(19) United States
(12) Patent Application Publication
(10) Pub. No.: US 2025/0108129 A1
(43) Pub. Date: Apr. 3, 2025

(54) Exon skipping to treat Usher Syndrome

(71) Applicant: Massachusetts Eye and Ear Infirmary, Boston, MA (US)

(72) Inventors: Zheng-Yi Chen, Chestnut Hill, MA (US); Wenliang Zhu, Malden, MA (US)

(21) Appl. No.: 18/833,060

(22) PCT Filed: Feb. 3, 2023
(86) PCT No.: PCT/US2023/012284

§ 371 Date: Jul. 25, 2024

Related U.S. Application Data
(60) Provisional application No. 63/306,833, filed on Feb. 4, 2022.

(51) Int. Cl. A61K 48/00; A61P 27/16; C12N 9/22; C12N 15/11; C12N 15/86

(52) U.S. Cl. CPC A61K 48/005; A61P 27/16; C12N 9/22; C12N 15/111; C12N 15/86; C12N 2310/20; C12N 2320/33; C12N 2750/14143

(57) ABSTRACT

Compositions for use in treating subjects with USH2A-associated retinal and/or cochlear disease that result from mutations in exon 13 of the USH2A gene by deletion of exon 13 splicing acceptor sequences from the USH2A gene or transcripts, and methods of use thereof, as well as genetically modified animals and cells.

### CROSS-REFERENCE TO RELATED APPLICATIONS

[0001] This application claims the benefit of U.S. Provisional Patent Application No. 63/306,833, filed Feb. 4, 2022. The contents of this application are incorporated herein by reference in its entirety.

### FEDERALLY SPONSORED RESEARCH OR DEVELOPMENT

[0002] This invention was made with Government support under Grant Nos. DC016875 and TR002636 awarded by the National Institutes of Health. The Government has certain rights in the invention.

### TECHNICAL FIELD

[0003] Compositions for use in treating subjects with USH2A-associated retinal and/or cochlear degeneration that result from mutations in exon 13 of the USH2A gene by deletion of exon 13 splicing acceptor sequences from the USH2A gene or transcripts, and methods of use thereof, as well as genetically modified animals and cells.

### BACKGROUND

[0004] Usher syndrome (USH) is the leading cause of inherited combined hearing and vision loss. Among patients with Usher syndrome, approximately two out of three suffer from Usher syndrome type II (USH2), of whom more than 75% of cases are caused by mutations in the USH2A gene. Patients with USH2 display moderate-to-severe hearing loss, post-pubertal onset of retinitis pigmentosa (RP) and normal vestibular reflexes, and USH2 represents the most common form of inherited deaf-blindness and is estimated to affect approximately 1 in 17,000 individuals. In particular, mutations in exon 13 account for approximately 35% of all USH2 cases, including a single base deletion at position 2299 (c.2299delG), which is the most common mutation accounting for about 24% of cases.

### SUMMARY

[0005] Provided herein are nucleic acids comprising sequences encoding a Cas9 protein, and a first gRNA, and a second gRNA, wherein the target sequence of the first gRNA is any one of SEQ ID NOs: 2-244 provided in Table 1, and the target sequence of the second gRNA is any one of SEQ ID NOs: 245-431 provided in Table 2. The target sequence of the first gRNA falls in the 3′ 1000 base-pairs (bp) of intron 12 and the target sequence of the second gRNA falls in exon 13; any combination of a first gRNA having a target sequence of any one of SEQ ID NOs: 2-244, and a second gRNA having a target sequence of any one of SEQ ID NOs: 245-431 can be used, in order to delete the relevant DNA fragment from the genome. In some embodiments, the target sequence of the first gRNA is SEQ ID NO: 17 and the target sequence of the second gRNA is SEQ ID NO: 313. In some embodiments, the target sequence of the first gRNA is SEQ ID NO: 17 and the target sequence of the second gRNA is SEQ ID NO: 260. A deletion mediated by paired-gRNAs provided herein will include part of intron 12 and part of exon 13, with deletion size ranging from 6 bp to several kilobase-pairs (kb), all of which can induce human USH2A exon 13 skipping, with the preferred range being 6 kb to 2 kb, with certain preferred combinations of gRNAs.

[0006] In some embodiments, the nucleic acid encodes S. pyogenes Cas9 or S. aureus Cas9 (optionally KKH SaCas9). In some embodiments, the Cas9 comprises a nuclear localization signal, e.g., a C-terminal nuclear localization signal and/or an N-terminal nuclear localization signal; and/or wherein the sequences encoding Cas9 comprises a polyadenylation signal.

[0007] In some embodiments, the gRNA is a unimolecular S. aureus or S. pyogenes gRNA, or the corresponding two-part modular S. aureus or S. pyogenes gRNA (see, e.g., WO 2018/026976).

[0008] In some embodiments, the nucleic acid comprises a viral delivery vector, preferably an adeno-associated virus (AAV) vector. In some embodiments, the viral delivery vector comprises a promoter for Cas9, preferably a CMV, EFS, U1A or hGRK1 promoter. In some embodiments, the nucleic acid comprises:
[0009] (i) a first guide RNA comprising a targeting domain sequence selected from any one of SEQ ID NOs: 2-244 and a second guide RNA comprising a targeting domain sequence selected from any one of SEQ ID NOs: 245-431;
[0010] (ii) a first and a second inverted terminal repeat sequence (ITR); and
[0011] (iii) a promoter for driving expression of the Cas9 selected from the group consisting of a CMV, an EFS, U1A or an hGRK1 promoter.

[0012] The nucleic acids described herein can be used, e.g., in therapy, or in preparation of a medicament. For example, the nucleic acids can be uses in a method of treating a subject who has a condition associated with a mutation in exon 13 of the USH2A gene.

[0013] In some embodiments, the condition is Usher Syndrome type 2 or autosomal recessive retinitis pigmentosa (arRP).

[0014] In some embodiments, the AAV vector is delivered to a retina of a subject by injection, such as by subretinal injection, or is delivered to the inner ear of a subject by injection, e.g., through the round window.

[0015] Additionally provided herein are compositions comprising first ribonucleoprotein (RNP) complexes comprising a Cas9 protein and a first gRNA or sgRNA, and/or second RNP complexes comprising a Cas9 protein and a second gRNA or sgRNA, wherein the target sequence of the first gRNA is any one of SEQ ID NOs: 2-244 and the target sequence of the second gRNA is any one of SEQ ID NOs: 245-431. In some embodiments, the Cas9 is S. aureus Cas9, optionally KKH SaCas9 (optionally KKH SaCas9) or S. pyogenes Cas9.

[0016] Further provided are methods for deleting a sequence comprising an exon 13 splicing acceptor sequence from the USH2A gene in a cell, wherein the deletion contains part of intron 12 and part of exon 13, ranging from 6 bp to several kb, all of which could induce human USH2A exon 13 skipping, though the ideal range is below 2 kb. The methods include contacting the cell with a nucleic acid or composition as described herein.

[0017] Also provided herein are methods for genome editing in human cells, including using CRISPR editing to form a first double strand break within intron 12 of the human USH2A gene and a second double strand break within exon 13 of the human USH2A gene and results in the removal of a fragment of genome DNA containing part of intron 12 and part of exon 13 of the USH2A gene on chromosome 1. In some embodiments, the first double strand break is generated using a gRNA having a target sequence of any one of SEQ ID NOs: 2-244 and the second double strand break is generated using a gRNA having a target sequence of any one of SEQ ID NOs: 245-431.

[0018] In some embodiments, the cell is in or from a subject who has a mutation in the USH2A gene. In some embodiments, the cell is a cell of the eye or inner ear of a mammal.

[0019] Unless otherwise defined, all technical and scientific terms used herein have the same meaning as commonly understood by one of ordinary skill in the art to which this invention belongs. Methods and materials are described herein for use in the present invention; other, suitable methods and materials known in the art can also be used. The materials, methods, and examples are illustrative only and not intended to be limiting. All publications, patent applications, patents, sequences, database entries, and other references mentioned herein are incorporated by reference in their entirety. In case of conflict, the present specification, including definitions, will control.

[0020] Other features and advantages of the invention will be apparent from the following detailed description and figures, and from the claims.

### DESCRIPTION OF DRAWINGS

[0021] FIG. 1. Schematic diagram of CRISPR/Cas9 splicing acceptor targeting strategy to induce USH2A exon 13 skipping by a pair of gRNAs targeting the flanking genomic DNA of the splicing acceptor site.

[0022] FIGS. 2A-I. Splicing acceptor targeting strategy increases exon 12 (human exon 13 equivalent) skipping in-frame Ush2A transcript in mouse cells.
[0023] (a). Gel image showing full exon 12 deletion strategy in the genome using CRISPR/Cas9. Red asterisks indicate fragment after deletion.
[0024] (b). Schematic diagram of full exon 12 deletion strategy.
[0025] (c). Next generation sequencing (NGS) of edited genomic DNA confirming the deletion of exon 12.
[0026] (d). Gel image showing splicing acceptor targeting strategy deleting Ush2A exon 12 splicing acceptor in HEI-OC1 cells. Asterisk indicates the fragment after deletion.
[0027] (e). Schematic diagram of splicing acceptor targeting strategy.
[0028] (f). NGS demonstrating genome editing efficiency of full exon 12 deletion and splicing acceptor targeting deletion strategy.
[0029] (g). Quantification of genome editing efficiency of full exon 12 deletion (sgL1+sgR1) and splicing acceptor targeting (sgL1+sgK4) deletion strategy.
[0030] (h). Gel image showing different Ush2A transcripts with or without genome editing.
[0031] (i). qPCR quantification of exon 12-unskipped (upper) and -skipped (lower) transcripts with or without genome editing.

[0032] FIGS. 3A-H. Efficient genome editing at USH2A exon 13 loci using splicing acceptor targeting strategy in human cells.
[0033] (a). Schematic diagram of full exon 13 deletion strategy shows expected in-frame transcript with the skipped exon13.
[0034] (b). Gel image showing full USH2A exon 13 deletion in WERI-RB1 cells genome. Asterisks indicate fragments after deletion.
[0035] (c). Pie chart showing the percentage of deletion and indels after genome editing using full USH2A exon 13 strategy.
[0036] (d). Schematic diagram of splicing acceptor targeting deletion strategy targeting the splicing site shows expected in-frame transcript with the skipped exon 13.
[0037] (e). Gel image showing fragments deletion using splicing acceptor targeting strategy in WERI-RB1 cells. Asterisks indicate fragments after deletion.
[0038] (f). Pie chart showing the percentage of deletion and indels after genome editing using paired gRNAs sgRNA-L1(sgL1), sgRNA-K4 (sgK4).
[0039] (g). Pie chart showing the percentage of deletion and indels after genome editing using paired gRNAs sgRNA-L1(sgL1), sgRNA-K5 (sgK5).
[0040] (h). NGS of edited genome DNA showing USH2A exon 13 splicing acceptor deletion after genome editing using sgRNA-L1, sgRNA-K5.

[0041] FIGS. 4A-I. Splicing acceptor targeting strategy caused small deletion results in robust generation of USH2A exon 13 skipping transcripts in human cells.
[0042] (a). Schematic diagram of exon 13-unskipped (upper) and -skipped (lower) transcripts of human USH2A.
[0043] (b). Gel image showing exon skipping efficiency with or without genome editing. Red arrows indicate USH2A transcripts.
[0044] (c). Representative Sanger sequencing data showing exon 13 skipping in USH2A transcript after genome editing.
[0045] (d). Pie chart showing the percentage of different USH2A transcripts in unedited cells.
[0046] (e). Pie chart showing the percentage of different USH2A transcripts in cells edited with paired gRNAs sgL1 and sgR2.
[0047] (f). Pie chart showing the percentage of different USH2A transcripts in cells edited with paired gRNAs sgL1 and sgK4.
[0048] (g). Pie chart showing the percentage of different USH2A transcripts in cells edited with paired gRNAs sgL1 and sgK5. This combination generates the highest percentage (73%) of exon 13-skipped USH2A transcripts in human cells.
[0049] (h). NGS data generated from cDNA derived from human cells edited with paired gRNAs sgL1 and sgK4, showing different USH2A transcripts generated by splicing acceptor targeting genome editing.
[0050] (i). NGS data generated from cDNA derived from human cells edited with paired gRNAs sgL1 and sgK5, showing different USH2A transcripts generated by splicing acceptor targeting genome editing.

[0051] FIGS. 5A-F. Splicing acceptor targeting strategy induces USH2A exon 13-skipped transcripts in human induced pluripotent stem cells (hiPSCs) derived from an USH2 patient harboring a homozygous mutation c.2299delG).
[0052] (a). Sequence information of the USH2A mutation in the hiPSCs derived from an USH2 patient.
[0053] (b). Gel image showing genome editing efficiency after editing of the hiPSCs by different dosage of CRISPR/Cas9-sgL1/sgK5 targeting the splicing acceptor site. Arrow indicates edited fragment after deletion.
[0054] (c). Pie chart showing the percentage of deletion and indels after genome editing using CRISPR/Cas9-sgL1/sgK5 with an efficiency of 75% for exon 13 skipping.
[0055] (d). Schematic diagram of USH2A transcription activation using dCas9/gRNA-directed synergistic activation mediator (SAM) system.
[0056] (e). Gel image showing exon 13 skipping in edited hiPSCs derived from an USH2 patient after SAM activation.
[0057] (f). Pie charts showing the percentage of different USH2A transcripts in edited hiPSCs derived from an USH2 patient after SAM activation. 71% of USH2A transcripts indicated exon 13 skipping.

[0058] FIGS. 6A-6B. Efficient exon skipping in inner ear organoids generated from hiPSCs derived from an USH2 patient.
[0059] (a). Gel image shows a full length USH2A transcript in a healthy control and in inner ear organoids generated from hiPSCs derived from an USH2 patient. After exon skipping, exon 13 was skipped in a majority of transcripts as shown by an arrow at day 50.
[0060] (b). Bar graph showing quantitation of the ratio between USH2A exon 13-skipped transcripts and full-length USH2A transcripts, indicating over 75% exon 13 skipping mediated by the sgRNA pair sgL1/sgK5 in inner ear organoids generated from hiPSCs derived from an USH2 patient.

[0061] FIGS. 7A-7B. Exon 5 skipping in Ush2a gene causes hearing loss in mice.
[0062] (a). Plot of auditory brainstem response (ABR) threshold shifts, showing that exon 5 skipping in the normal allele leads to hearing loss in a mouse model of Usher syndrome (WT/KO), in which one Ush2a allele is normal whereas the other allele was disrupted.
[0063] (b). Plot of distortion product otoacoustic emission (DPOAE) threshold shifts, showing that exon 5 skipping in the normal allele leads to hearing loss in a mouse model of Usher syndrome (WT/KO), in which one Ush2a allele is normal whereas the other allele was disrupted.

### DETAILED DESCRIPTION

[0064] Gene therapy for USH2 by AAV is severely hampered by the size of the USH2A cDNA (15,606 nucleotides), which exceeds by a significant margin the cargo capacity of AAVs. Alternatively, skipping exon 13 in the USH2A transcript could be a potential treatment modality in which the resulting transcript encodes a slightly shortened in-framed USHERIN protein, lacking several of the Laminin EGF-like domains. The USHERIN protein translated from exon 13-skipped transcripts retains functionality, so the exon 13 skipping strategy has therapeutic potential for any hearing loss caused by mutations of USH2A exon 13.

### Robust Exon Skipping Induction by Exon 13 Splicing Acceptor Deletion Using CRISPR/Dual-sgRNA.

[0065] Deletion of the splicing acceptor can mediate exon 13 skipping in USH2A transcripts. The splicing acceptor can be deleted by gene editing at a higher efficiency relative to deleting the entire exon 13. Cas9 and dual sgRNAs can be delivered into patients' inner ear by, e.g., AAV vector or lipid nanoparticles.

[0066] Compared to other potential treatments for Usher syndrome such as antisense oligonucleotide (AON)-based treatments, the efficacy of which is difficult to evaluate and may require multiple treatments throughout the life of the subject, the compositions and methods disclosed here provide a one-time therapeutic, including the exon 13 skipping strategy, that could have durability, even for a patient's entire lifetime. In addition, the present disclosure provides evidence of robust induction of specific target exon skipping, which can be developed into gene-editing therapies for diseases involving other splicing mutations.

[0067] Specific combinations of gRNAs mediate efficient removal of USH2A exon 13 in multiple human cell lines, e.g., WERI-RB1 cells, and human induced pluripotent stems cells (hiPSCs) derived from an Usher syndrome patient. Exon 13 removal leads to efficient production of USH2A in-frame transcripts excluding exon 13, which are shown in a mouse model to be functional and promote rescue of hearing and vision. We also generated human inner ear organoids from hiPSCs derived from an Usher syndrome patient and a healthy control individual.

[0068] The USHERIN protein encoded by USH2A (GenBank Acc No. NC_000001.11, Reference GRCh38.p7 Primary Assembly, Range 215622894-216423396, complement; SEQ ID NO:1) is a transmembrance protein anchored in the photoreceptor plasma membrane (van Wijk, E., et al., Am J Hum Genet, 2004. 74 (4): p. 738-44; Grati, M., et al., J Neurosci, 2012. 32 (41): p. 14288-93). Its extracellular portion, which accounts for over 96% of the length of the protein and projects into the periciliary matrix, is thought to have an important structural and a possible signaling role for the long-term maintenance of photoreceptors (van Wijk, E., et al., Am J Hum Genet, 2004. 74 (4): p. 738-44; Grati, M., et al., J Neurosci, 2012. 32 (41): p. 14288-93). Two isoforms of USH2A have been described. Isoform b (GenBank Acc. No. NM_206933.2 (transcript) and NP_996816.2 (protein)) is most abundantly expressed in retina and is used as the canonical, standard sequence in the literature and in this application.

### Methods of Treatment

[0069] CRISPR/Cas-based exon-skipping has been successfully used for restoring the expression of functional dystrophin and dystrophic muscle function in the Duchene muscular dystrophy mouse model. The methods described herein include methods for the treatment of disorders associated with mutations in exon 13 of the USH2A gene.

[0070] In some embodiments, the disorder is Usher syndrome, e.g., type 2 Usher syndrome. Subjects with type 2 Usher syndrome (USH2) typically have moderate to severe hearing loss at birth, and vision that becomes progressively impaired starting in adolescence. In some embodiments, the disorder is autosomal recessive retinitis pigmentosa (arRP). Generally, the methods include administering a therapeutically effective amount of a genome editing system as described herein, to a subject who is in need of, or who has been determined to be in need of, such treatment. The term “genome editing system” refers to any system having RNA-guided DNA editing activity. Genome editing systems of the present disclosure include at least two components adapted from naturally occurring CRISPR systems: a gRNA and an RNA-guided nuclease. These two components form a complex that is capable of associating with a specific nucleic acid sequence in a cell and editing the DNA in or around that nucleic acid sequence, for example by making one or more of a single-strand break (an SSB or nick), a double-strand break (a DSB) and/or a base substitution. See, e.g., WO2018/026976 for a full description of exemplary genome editing systems.

[0071] As used in this context, to “treat” means to ameliorate at least one symptom of the disorder associated with mutations in exon 13 of the USH2A gene. Often, these mutations result in hearing loss and/or loss of sight; thus, a treatment comprising administration of a therapeutic gene editing system as described herein can result in a reduction in hearing impairment and/or visual impairment; a reduction in the rate of progression of hearing loss and/or vision loss; and/or a return or approach to normal hearing and/or vision. Hearing and vision can be tested using known methods, e.g., electroretinogram, optical coherence tomography, videonystagmography, and audiology testing.

[0072] The methods can be used to treat any subject (e.g., a mammalian subject, preferably a human subject) who has a mutation in exon 13 of the USH2A gene, e.g., the c.2299delG mutation or c.2276G>T mutation, e.g., in one or both alleles of USH2A. As used herein, an “allele” is one of a pair or series of genetic variants of a polymorphism (also referred to as a mutation) at a specific genomic location. As used herein, “genotype” refers to the diploid combination of alleles for a given genetic polymorphism. A homozygous subject carries two copies of the same allele and a heterozygous subject carries two different alleles. Methods for identifying subjects with such mutations are known in the art; see, e.g., Yan et al., J Hum Genet. 2009 December; 54 (12): 732-738; Leroy et al., Exp Eye Res. 2001 May; 72 (5): 503-9; or Consugar et al., Genet Med. 2015 April; 17 (4): 253-261. For example, gel electrophoresis, capillary electrophoresis, size exclusion chromatography, sequencing, and/or arrays can be used to detect the presence or absence of the allele or genotype. Amplification of nucleic acids, where desirable, can be accomplished using methods known in the art, e.g., PCR. In one example, a sample (e.g., a sample comprising genomic DNA), is obtained from a subject. The DNA in the sample is then examined to identify or detect the presence of an allele or genotype as described herein. The allele or genotype can be identified or determined by any method described herein, e.g., by Sanger sequencing or Next Generation Sequencing (NGS). Since the exon 13 is 643 bp in size, thus the genotyping of the patients with exon 13 mutations is simple and straight forward using Sanger sequencing or NGS. Other methods can include hybridization of the gene in the genomic DNA, RNA, or cDNA to a nucleic acid probe, e.g., a DNA probe (which includes cDNA and oligonucleotide probes) or an RNA probe. The nucleic acid probe can be designed to specifically or preferentially hybridize with a particular mutation (also referred to as a polymorphic variant).

[0073] Other methods of nucleic acid analysis can include direct manual sequencing (Church and Gilbert, Proc. Natl. Acad. Sci. USA 81:1991-1995 (1988); Sanger et al., Proc. Natl. Acad. Sci. USA 74:5463-5467 (1977); Beavis et al., U.S. Pat. No. 5,288,644); automated fluorescent sequencing; single-stranded conformation polymorphism assays (SSCP) (Schafer et al., Nat. Biotechnol. 15:33-39 (1995)); clamped denaturing gel electrophoresis (CDGE); two-dimensional gel electrophoresis (2DGE or TDGE); conformational sensitive gel electrophoresis (CSGE); denaturing gradient gel electrophoresis (DGGE) (Sheffield et al., Proc. Natl. Acad. Sci. USA 86:232-236 (1989)); denaturing high performance liquid chromatography (DHPLC, Underhill et al., Genome Res. 7:996-1005 (1997)); infrared matrix-assisted laser desorption/ionization (IR-MALDI) mass spectrometry (WO 99/57318); mobility shift analysis (Orita et al., Proc. Natl. Acad. Sci. USA 86:2766-2770 (1989)); restriction enzyme analysis (Flavell et al., Cell 15:25 (1978); Geever et al., Proc. Natl. Acad. Sci. USA 78:5081 (1981)); quantitative real-time PCR (Raca et al., Genet Test 8 (4): 387-94 (2004)); heteroduplex analysis; chemical mismatch cleavage (CMC) (Cotton et al., Proc. Natl. Acad. Sci. USA 85:4397-4401 (1985)); RNase protection assays (Myers et al., Science 230:1242 (1985)); use of polypeptides that recognize nucleotide mismatches, e.g., E. coli mutS protein; allele-specific PCR, and combinations of such methods. See, e.g., Gerber et al., U.S. Patent Publication No. 2004/0014095 which is incorporated herein by reference in its entirety.

[0074] In certain aspects, the present disclosure provides AAV vectors encoding CRISPR/Cas9 genome editing systems including a first gRNA and a second gRNA, wherein the target sequence of the first gRNA is any one of SEQ ID NOs: 2-244 provided in Table 1, and the target sequence of the second gRNA is any one of SEQ ID NOs: 245-431 provided in Table 2, and provides the use of such vectors to treat USH2A-associated disease. Exemplary AAV vector genomes are known in the art; see, e.g., FIG. 9 PCT/US2019/023934, which illustrates certain fixed and variable elements of these vectors: inverted terminal repeats (ITRs), one or two gRNA sequences and promoter sequences to drive their expression, a Cas9 coding sequence and another promoter to drive its expression. Each of these elements is discussed in detail herein. Although a single vector can be used to deliver a Cas9 and two gRNAs, in some embodiments a plurality of vectors are used, e.g., wherein one vector is used to deliver Cas9, and another vector or vectors is used to deliver one or more gRNAs (e.g., one vector for one gRNA, one vector for two gRNAs, or two vectors for each of two gRNAs).

### RNA-Guided Nucleases/Cas9

[0075] Various RNA-guided nucleases can be used in the present methods, e.g., as described in WO 2018/026976. This approach can use different CRISPR proteins and their corresponding gRNAs, including Streptococcus pyogenes Cas9 (SpCas9) and engineered SpCas9 variants, Staphylococcus aureus Cas9 (SaCas9), KKH variant SaCas9 (See Kleinstiver et al., Nat Biotechnol. 2015 December; 33 (12): 1293-1298; WO 2016/141224), Cpf1 (also known as Cas12a, such as AsCpf1, LPCpf1), Cas12f (such as Un1Cas12f1, AsCas12f1) etc. In some embodiments, the RNA-guided nuclease used in the present methods and compositions is a S. aureus Cas9 or a S. pyogenes cas9. In some embodiments of this disclosure a Cas9 sequence is modified to include two nuclear localization sequences (NLSs) (e.g., PKKKRKV (SEQ ID NO: 432) at the C- and N-termini of the Cas9 protein, and a mini-polyadenylation signal (or Poly-A sequence). An exemplary NLS is SV40 large T antigen NLS (PKKKRRV (SEQ ID NO: 433)) and nucleoplasmin NLS (KRPAATKKAGQAKKKK (SEQ ID NO: 434)). Other NLSs are known in the art; see, e.g., Cokol et al., EMBO Rep. 2000 Nov. 15; 1 (5): 411-415; Freitas and Cunha, Curr Genomics. 2009 December; 10 (8): 550-557. An exemplary polyadenylation signal is TAGCAATAAAGGATCGTTTATTTTCATTGGAAGCGTGTG TTGGTTTTTTGATCAGGCGCG (SEQ ID NO: 435)). Exemplary S. aureus Cas9 sequences (both nucleotide and peptide) are described in Table 4 of WO 2018/026976, e.g., SEQ ID NOs 10 and 11 therein.

### Guide RNAs

[0076] In some embodiments, the gRNAs used in the present disclosure can be unimolecular or modular, as described below.

[0077] Described herein are approaches for treating subjects with mutations in exon 13 of USH2A that make use of dual-gRNAs for deletion of exon 13. Two gRNAs (sgRNA-L and sgRNA-R, one with target sequence in intron 12, one with target sequence in intron 13) are used in combination to delete a small DNA fragment containing the exon 13 splicing acceptor. sgRNA-L has a target sequence in intron 12 and sgRNA-R has a target sequence in exon 13. Tables 1 and 2 provide exemplary sequences for target sequences of the sgRNAs targeting intron 12 (sgRNA-L) and exon 13 (sgRNA-R), respectively. The sgRNA targets fall in the 3′ 1000 bp of intron 12 (SEQ ID NOs: 2-244) and exon 13 (SEQ ID NOs: 245-431). Note that in the sequences provided here, the actual sgRNA would have U in place of T.

[0078] In some embodiments of these methods, any combination of a first gRNA having a target sequence of any one of SEQ ID NOs: 2-244, and a second gRNA having a target sequence of any one of SEQ ID NOs: 245-431 can be used to delete a certain DNA fragment from the genome, though certain combinations may be more preferred, as exemplified below.

[0079] In some embodiments, the compositions and methods disclosed herein use Staphylococcus aureus Cas9 (SaCas9) and corresponding gRNAs. SaCas9 is one of several smaller Cas9 orthologues that are suited for viral delivery (Horvath et al., J Bacteriol 190, 1401-1412 (2008); Ran et al., Nature 520, 186-191 (2015); Zhang et al., Mol Cell 50, 488-503 (2013)). The wild type recognizes a longer NNGRRT PAM that is expected to occur once in every 32 bps of random DNA; or the alternative NNGRRA PAM. Tables 1 and 2 provide exemplary sequences for the target site in exons 12 and 13, respectively. Note that the “target site” sequences provided herein are the sequences of the gRNA (although gRNA would have U in place of T).

TABLE 1
Target sequences of exemplary sgRNA-L targeting USH2A
intron 12, Reference genome: Human GRCh38 (NCBI RefSeq NC_000001.11)
chr1: 216247225-216248226.

| | | | SEQ ID |
|---|---|---|---|
| sgRNA NO. | targetSeq | CRISPR protein | NO: |
| In12-1 | AGAGTAAGATTGGCCCCCTA | SpCas9 | 2. |
| In12-2 | CTCACAAGCAATGCCATAGG | SpCas9 | 3. |
| In12-3 | TAATTATACCTTCGTGAAGC | SpCas9 | 4. |
| In12-4 | TCTCACAAGCAATGCCATAG | SpCas9 | 5. |
| In12-5 | CTTTTTTCCCAGCTTCACGA | SpCas9 | 6. |
| In12-6 | GTTGTTTCTGTTACATATGC | SpCas9 | 7. |
| In12-7 | AATATAAATCATGCTCTCCT | SpCas9 | 8. |
| In12-8 | TTCTCACAAGCAATGCCATA | SpCas9 | 9. |
| In12-9 | AACTTATCCAGGGCAATTTT | SpCas9 | 10. |
| In12-10 | TTTCTCACAAGCAATGCCAT | SpCas9 | 11. |
| In12-11 | AATTATACCTTCGTGAAGCT | SpCas9 | 12. |
| In12-12 | GATTAAACCAAAAATTGCCC | SpCas9 | 13. |
| In12-13 | TGTGATTGCTTTATGAGCCA | SpCas9 | 14. |
| In12-14 | TTGAATTTTGAGAGTAAGAT | SpCas9 | 15 |
| In12-15 | AATTTACTTAGTGTTTAAAG | SpCas9 | 16. |
| In12-16 | TATATTTAAAAGGTGAGGAT | SpCas9 | 17. |
| In12-17 | AAAATAGAGGAGCATACAAA | SpCas9 | 18. |
| In12-18 | TCATGTACTTATCATGTTTT | SpCas9 | 19. |
| In12-19 | CTCTAAAGATGTTTAATAAA | SpCas9 | 20. |
| In12-20 | ATATATTTAAAAGGTGAGGA | SpCas9 | 21. |
| In12-21 | ATATAAATAAAACTTATCCA | SpCas9 | 22. |
| In12-22 | TTTATATTACTTCTATTTAA | SpCas9 | 23. |
| In12-23 | ATATTAATTACTTAAATGTG | SpCas9 | 24. |
| In12-24 | ATGTACTTATCATGTTTTTG | SpCas9 | 25. |
| In12-25 | TAAAATATATTTAAAAGGTG | SpCas9 | 26. |
| In12-26 | AATTGAAAATGATAAAATAG | SpCas9 | 27. |
| In12-27 | AAAAACATGATAAGTACATG | SpCas9 | 28. |
| In12-28 | TGATGGATACATTAATTAGC | SpCas9 | 29. |
| In12-29 | AATATAAATAAAACTTATCC | SpCas9 | 30. |
| In12-30 | CATGTACTTATCATGTTTTT | SpCas9 | 31. |
| In12-31 | TGGAGCTCTATTGTACAGCA | SpCas9 | 32. |
| In12-32 | ATGATAAGTACATGAGGTGA | SpCas9 | 33. |
| In12-33 | TAGACAGAATGAATAAGTTC | SpCas9 | 34. |
| In12-34 | ATAAAAATTGTATATATTTA | SpCas9 | 35. |
| In12-35 | AAAGATAAAATATATTTAAA | SpCas9 | 36. |
| In12-36 | TTTAAATATATTTTATCTTT | SpCas9 | 37. |
| In12-37 | TTAAATATATTTTATCTTTA | SpCas9 | 38. |
| In12-38 | ATAGGGGGCCAATCTTACTCT | KKH-SaCas9 | 39. |
| In12-39 | ATTCAAGATAGACGAGACACA | KKH-SaCas9 | 40. |
| In12-40 | TAAAACTTATCCAGGGCAATT | KKH-SaCas9 | 41. |
| In12-41 | AAATTTATGAAGTTCATCGCA | KKH-SaCas9 | 42. |
| In12-42 | TTTTTCCCAGCTTCACGAAGG | KKH-SaCas9 | 43. |
| In12-43 | CCCAGCTTCACGAAGGTATAA | KKH-SaCas9 | 44. |
| In12-44 | TCACAAGCAATGCCATAGGGG | KKH-SaCas9 | 45. |
| In12-45 | CTACTGCAGATGATACGAACA | KKH-SaCas9 | 46. |
| In12-46 | CGAGACACAAACAATGCTACT | KKH-SaCas9 | 47. |
| In12-47 | CTTATCCAGGGCAATTTTTGG | KKH-SaCas9 | 48. |
| In12-48 | ATATTTTGTGTTCGTATCATC | KKH-SaCas9 | 49. |
| In12-49 | ATTGTTTGTGTCTCGTCTATC | KKH-SaCas9/SaCas9 | 50. |
| In12-50 | AGCATACAAAAGGATTAAACC | KKH-SaCas9 | 51. |
| In12-51 | TTGTGTCTCGTCTATCTTGAA | KKH-SaCas9 | 52. |
| In12-52 | GGGCCAATCTTACTCTCAAAA | KKH-SaCas9 | 53. |
| In12-53 | GACACAAACAATGCTACTGCA | KKH-SaCas9 | 54. |
| In12-54 | TCTGAGTCACACAAGATGACA | KKH-SaCas9 | 55. |
| In12-55 | CTGAATCCACACATTTAAGTA | KKH-SaCas9 | 56. |
| In12-56 | TGCTTTATGAGCCAAGGAGAG | KKH-SaCas9 | 57. |
| In12-57 | GTCACACAAGATGACAAGCAA | KKH-SaCas9 | 58. |
| In12-58 | ACATACCTCTTTAAACACTAA | KKH-SaCas9 | 59. |
| In12-59 | TTAAACCAAAAATTGCCCTGG | KKH-SaCas9 | 60. |
| In12-60 | ATTACTTAAATGTGTGGATTC | KKH-SaCas9 | 61. |
| In12-61 | TTGCGATGAACTTCATAAATT | KKH-SaCas9 | 62. |
| In12-62 | CATGCTCTCCTTGGCTCATAA | KKH-SaCas9 | 63. |
| In12-63 | CTTATTTCTGAATCCACACAT | KKH-SaCas9 | 64. |
| In12-64 | GGCATTGCTTGTGAGAAAACA | KKH-SaCas9 | 65. |
| In12-65 | CAGAACATACCTCTTTAAACA | KKH-SaCas9 | 66. |
| In12-66 | TCATTTTCCCATCCTCACCTT | KKH-SaCas9 | 67. |
| In12-67 | AGAGGTATGTTCTGAGTCACA | KKH-SaCas9 | 68. |
| In12-68 | AGGATTAAACCAAAAATTGCC | KKH-SaCas9/SaCas9 | 69. |
| In12-69 | AATGACAATATTTAATTTAGC | KKH-SaCas9 | 70. |
| In12-70 | AAAATGTATATGTGTACTCCT | KKH-SaCas9 | 71. |
| In12-71 | AATAAAAGGTTAAGCTGAGTA | KKH-SaCas9 | 72. |
| In12-72 | GCAAACAGTTGTATATTAAAG | KKH-SaCas9 | 73. |
| In12-73 | TAGTGTTTAAAGAGGTATGTT | KKH-SaCas9/SaCas9 | 74. |
| In12-74 | CTTAAATGTGTGGATTCAGAA | KKH-SaCas9 | 75. |
| In12-75 | TTCACGAAGGTATAATTAAAT | KKH-SaCas9 | 76. |
| In12-76 | AATATTGAGTGTTTTCTCACA | KKH-SaCas9 | 77. |
| In12-77 | ATGTGTACTCCTTTAAATAGA | KKH-SaCas9 | 78. |
| In12-78 | AAGTGTATATGCTGTTTTCAC | KKH-SaCas9 | 79. |
| In12-79 | ATTTTAACAAATGTGCTCATT | KKH-SaCas9 | 80. |
| In12-80 | TAGCTTTAATATACAACTGTT | KKH-SaCas9 | 81. |
| In12-81 | TCTTTGCATTAAGTAATAATT | KKH-SaCas9 | 82. |
| In12-82 | TATATGTGTACTCCTTTAAAT | KKH-SaCas9 | 83. |
| In12-83 | ATATAAATAAAACTTATCCAG | KKH-SaCas9 | 84. |
| In12-84 | AAACAGCATATACACTTATTT | KKH-SaCas9/SaCas9 | 85. |
| In12-85 | GATAAGAAATCTCTAAAGATG | KKH-SaCas9 | 86. |
| In12-86 | TTCTAAAGATAAGAAATCTCT | KKH-SaCas9 | 87. |
| In12-87 | CAGTTGTATATTAAAGCTAAA | KKH-SaCas9 | 88. |
| In12-88 | AGATGATACGAACACAAAATA | KKH-SaCas9/SaCas9 | 89. |
| In12-89 | GGATGGGAAAATGATTTCATT | KKH-SaCas9 | 90. |
| In12-90 | ATTTCTGAATCCACACATTTA | KKH-SaCas9 | 91. |
| In12-91 | GATGTTTAATAAAAGGTTAAG | KKH-SaCas9/SaCas9 | 92. |
| In12-92 | ATCTTACTCTCAAAATTCAAT | KKH-SaCas9 | 93. |
| In12-93 | TTTAAAAGGTGAGGATGGGAA | KKH-SaCas9 | 94. |
| In12-94 | CAGAATTTACTTAGTGTTTAA | KKH-SaCas9 | 95. |
| In12-95 | ATGCTCCTCTATTTTATCATT | KKH-SaCas9 | 96. |
| In12-96 | CGTGAAGCTGGGAAAAAAGAA | KKH-SaCas9 | 97. |
| In12-97 | AATCTCTAAAGATGTTTAATA | KKH-SaCas9 | 98. |
| In12-98 | TAGTAGAATTACATATAACAA | KKH-SaCas9 | 99. |
| In12-99 | ATGCAAAGAAAAATGCTTAAT | KKH-SaCas9 | 100. |
| In12-100 | AGAGCATGATTTATATTAATT | KKH-SaCas9 | 101. |
| In12-101 | ATTTGTTATATGTAATTCTAC | KKH-SaCas9 | 102. |
| In12-102 | CTGGAGCTCTTTTTCTCTTTA | KKH-SaCas9 | 103. |
| In12-103 | GCATTTTTCTTTGCATTAAGT | KKH-SaCas9 | 104 |
| In12-104 | TCTCAAAATTCAATGACAATA | KKH-SaCas9 | 105. |
| In12-105 | ATATTTAAAAGGTGAGGATGG | KKH-SaCas9 | 106. |
| In12-106 | TGTATATGCTGTTTTCACAAA | KKH-SaCas9 | 107. |
| In12-107 | CCCAAAAACATGATAAGTACA | KKH-SaCas9 | 108. |
| In12-108 | TGTGCTCATTTAAAATTATAG | KKH-SaCas9/SaCas9 | 109 |
| In12-109 | TAATTATTACTTAATGCAAAG | KKH-SaCas9 | 110. |
| In12-110 | GCATGATTTATATTAATTGAA | KKH-SaCas9 | 111. |
| In12-111 | TTTCTTTTTTCCCAGCTTCAC | KKH-SaCas9 | 112. |
| In12-112 | CATTAAGCATTTTTCTTTGCA | KKH-SaCas9 | 113. |
| In12-113 | CAACTGTTTGCGATGAACTTC | KKH-SaCas9 | 114. |
| In12-114 | ATTATAAAATGATTAATTCCA | KKH-SaCas9 | 115. |
| In12-115 | AAAAACAACTAATTTGTTATA | KKH-SaCas9 | 116. |
| In12-116 | ATTTTAAATGAGCACATTTGT | KKH-SaCas9 | 117. |
| In12-117 | TTAAATGAGCACATTTGTTAA | KKH-SaCas9 | 118. |
| In12-118 | AAGCTAAATTAAATATTGTCA | KKH-SaCas9/SaCas9 | 119. |
| In12-119 | TCCTCTATTTTATCATTTTCA | KKH-SaCas9 | 120. |
| In12-120 | ATATGTAATTCTACTATAATT | KKH-SaCas9 | 121. |
| In12-121 | ATTGTCATTGAATTTTGAGAG | KKH-SaCas9 | 122. |
| In12-122 | CCACACATTTAAGTAATTAAT | KKH-SaCas9 | 123. |
| In12-123 | TTGGGGTGAGAACATTTAAGA | KKH-SaCas9 | 124. |
| In12-124 | AACCTTTTATTAAACATCTTT | KKH-SaCas9 | 125. |
| In12-125 | ATTATAGTAGAATTACATATA | KKH-SaCas9 | 126. |
| In12-126 | TAAGCATTTTTCTTTGCATTA | KKH-SaCas9 | 127. |
| In12-127 | TTAGTTGTTTTTCTAAAGATA | KKH-SaCas9 | 128. |
| In12-128 | TTATATTAATTACTTAAATGT | KKH-SaCas9/SaCas9 | 129. |
| In12-129 | GTATATATTTATGGCAGACAA | KKH-SaCas9 | 130. |
| In12-130 | AAAAACATGATAAGTACATGA | KKH-SaCas9 | 131. |
| In12-131 | TGTTCTCACCCCAAAAACATG | KKH-SaCas9 | 132. |
| In12-132 | GAGTACAAAGTTTCAGCTAGA | KKH-SaCas9/SaCas9 | 133. |
| In12-133 | TAACAAATTAGTTGTTTTTCT | KKH-SaCas9 | 134. |
| In12-134 | ACAAATGTGCTCATTTAAAAT | KKH-SaCas9 | 135. |
| In12-135 | TACTTAATGCAAAGAAAAATG | KKH-SaCas9 | 136. |
| In12-136 | ATTTTATCATTTTCAATTAAT | KKH-SaCas9 | 137. |
| In12-137 | GTGATGGATACATTAATTAGC | KKH-SaCas9/SaCas9 | 138. |
| In12-138 | CTCATGTACTTATCATGTTTT | KKH-SaCas9/SaCas9 | 139. |
| In12-139 | TAATATAAAAAACAGAATTTA | KKH-SaCas9 | 140. |
| In12-140 | AGTTTTATTTATATTAATTAC | KKH-SaCas9 | 141. |
| In12-141 | ACATGATAAGTACATGAGGTG | KKH-SaCas9/SaCas9 | 142. |
| In12-142 | CAAATCTTAAAAACTATTTTA | KKH-SaCas9 | 143. |
| In12-143 | CACATTTGTTAAAATAGTTTT | KKH-SaCas9 | 144. |
| In12-144 | TAAATATTGTCATTGAATTTT | KKH-SaCas9/SaCas9 | 145. |
| In12-145 | ATTTATATTAATTGAAAATGA | KKH-SaCas9 | 146. |
| In12-146 | ATAAAATAGAGGAGCATACAA | KKH-SaCas9/SaCas9 | 147. |
| In12-147 | CAAAACATCATGTTGTCTGCC | KKH-SaCas9 | 148. |
| In12-148 | TGATATATGTACACATTATAA | KKH-SaCas9 | 149. |
| In12-149 | ACATTTAAGATCTAATCTCTT | KKH-SaCas9 | 150. |
| In12-150 | AGTTTCAGCTAGACAGAATGA | KKH-SaCas9 | 151. |
| In12-151 | GATAAAATATATTTAAAAGGT | KKH-SaCas9/SaCas9 | 152. |
| In12-152 | CCTAAAGATAAAATATATTTA | KKH-SaCas9 | 153. |
| In12-153 | TTTTATATTACTTCTATTTAA | KKH-SaCas9/SaCas9 | 154. |
| In12-154 | CATAAATATATACAATTTTTA | KKH-SaCas9 | 155. |
| In12-155 | ATGTTGTCTGCCATAAATATA | KKH-SaCas9 | 156. |
| In12-156 | TAAATGTTCTCACCCCAAAAA | KKH-SaCas9 | 157. |
| In12-157 | AAATTGCTAAGAGATTAGATC | KKH-SaCas9 | 158. |
| In12-158 | CAAGTATACAATACATTATTA | KKH-SaCas9 | 159. |
| In12-159 | ACAAAGTTTCAGCTAGACAGA | KKH-SaCas9/SaCas9 | 160. |
| In12-160 | TTCATAAATTTTTAATTATTA | KKH-SaCas9 | 161. |
| In12-161 | ATTAGCTGGAATTAATCATTT | KKH-SaCas9 | 162. |
| In12-162 | AGTACATGAGGTGATGGATAC | KKH-SaCas9 | 163. |
| In12-163 | TTGTATACTTGAAAATTGCTA | KKH-SaCas9 | 164. |
| In12-164 | AGCATGGTGACTATACTTAAT | KKH-SaCas9 | 165. |
| In12-165 | TACAGCATGGTGACTATACTT | KKH-SaCas9 | 166. |
| In12-166 | AAATAGAAGTAATATAAAAAA | KKH-SaCas9/SaCas9 | 167. |
| In12-167 | GGAAAAAAGAAAAAAATGTCA | KKH-SaCas9 | 168. |
| In12-168 | TTATGGCAGACAACATGATGT | KKH-SaCas9 | 169. |
| In12-169 | TTTTGATATATGTACACATTA | KKH-SaCas9 | 170. |
| In12-170 | TGGATACATTAATTAGCTGGA | KKH-SaCas9 | 171. |
| In12-171 | ATACAATACATTATTATTAAG | KKH-SaCas9 | 172. |
| In12-172 | TTCTGGAGCTCTATTGTACAG | KKH-SaCas9 | 173. |
| In12-173 | TAAGTAATAATTAAAAATTTA | KKH-SaCas9 | 174. |
| In12-174 | TGTTTTTGGGGTGAGAACATT | KKH-SaCas9 | 175. |
| In12-175 | TACTTGAAAATTGCTAAGAGA | KKH-SaCas9 | 176. |
| In12-176 | ATAATAATGTATTGTATACTT | KKH-SaCas9 | 177. |
| In12-177 | GATCTAATCTCTTAGCAATTT | KKH-SaCas9 | 178. |
| In12-178 | TCTCTTAGCAATTTTCAAGTA | KKH-SaCas9 | 179. |
| In12-179 | TTGTACAGCATGGTGACTATA | KKH-SaCas9 | 180. |
| In12-180 | TTAAGTATAGTCACCATGCTG | KKH-SaCas9 | 181. |
| In12-181 | AATAGAAGTAATATAAAAAACAG | Cpf1/Cas12f | 182. |
| In12-182 | AAGGAGTACACATATACATTTTA | Cpf1/Cas12f | 183. |
| In12-183 | TATTACTTCTATTTAAAGGAGTA | Cpf1/Cas12f | 184. |
| In12-184 | CTTAGTGTTTAAAGAGGTATGTT | Cpf1/Cas12f | 185. |
| In12-185 | AAGAGGTATGTTCTGAGTCACAC | Cpf1/Cas12f | 186. |
| In12-186 | AACACTAAGTAAATTCTGTTTTT | Cpf1/Cas12f | 187. |
| In12-187 | TGAGCCAAGGAGAGCATGATTTA | Cpf1/Cas12f | 188. |
| In12-188 | TATTAATTGAAAATGATAAAATA | Cpf1/Cas12f | 189. |
| In12-189 | AATTAATATAAATCATGCTCTCC | Cpf1/Cas12f | 190. |
| In12-190 | TCATTTTCAATTAATATAAATCA | Cpf1/Cas12f | 191. |
| In12-191 | TATGCTCCTCTATTTTATCATTT | Cpf1/Cas12f | 192. |
| In12-192 | ATCCTTTTGTATGCTCCTCTATT | Cpf1/Cas12f | 193. |
| In12-193 | GTTTAATCCTTTTGTATGCTCCT | Cpf1/Cas12f | 194. |
| In12-194 | TTTATATTAATTACTTAAATGTG | Cpf1/Cas12f | 195. |
| In12-195 | TATTAATTACTTAAATGTGTGGA | Cpf1/Cas12f | 196. |
| In12-196 | AGTAATTAATATAAATAAAACTT | Cpf1/Cas12f | 197. |
| In12-197 | TGAATCCACACATTTAAGTAATT | Cpf1/Cas12f | 198. |
| In12-198 | ACAAAAATAGTTATCAGCTGACA | Cpf1/Cas12f | 199. |
| In12-199 | TGAAAACAGCATATACACTTATT | Cpf1/Cas12f | 200. |
| In12-200 | TTTTTTCCCAGCTTCACGAAGGT | Cpf1/Cas12f | 201. |
| In12-201 | CCAGCTTCACGAAGGTATAATTA | Cpf1/Cas12f | 202. |
| In12-202 | ATTATACCTTCGTGAAGCTGGGA | Cpf1/Cas12f | 203. |
| In12-203 | TTTAATTATACCTTCGTGAAGCT | Cpf1/Cas12f | 204. |
| In12-204 | TGGCAGACAACATGATGTTTTGT | Cpf1/Cas12f | 205. |
| In12-205 | ATATATGTACACATTATAAAATG | Cpf1/Cas12f | 206. |
| In12-206 | TAATGTGTACATATATCAAAACA | Cpf1/Cas12f | 207. |
| In12-207 | GGGTGAGAACATTTAAGATCTAA | Cpf1/Cas12f | 208. |
| In12-208 | AGATCTAATCTCTTAGCAATTTT | Cpf1/Cas12f | 209. |
| In12-209 | AAGTATACAATACATTATTATTA | Cpf1/Cas12f | 210. |
| In12-210 | AGCTAGACAGAATGAATAAGTTC | Cpf1/Cas12f | 211. |
| In12-211 | TACTCAGCTTAACCTTTTATTAA | Cpf1/Cas12f | 212. |
| In12-212 | TTAAACATCTTTAGAGATTTCTT | Cpf1/Cas12f | 213. |
| In12-213 | ATAAAAGGTTAAGCTGAGTACAA | Cpf1/Cas12f | 214. |
| In12-214 | GAGATTTCTTATCTTTAGAAAAA | Cpf1/Cas12f | 215. |
| In12-215 | TTATCTTTAGAAAAACAACTAAT | Cpf1/Cas12f | 216. |
| In12-216 | GAAAAACAACTAATTTGTTATAT | Cpf1/Cas12f | 217. |
| In12-217 | TAAAGATAAGAAATCTCTAAAGA | Cpf1/Cas12f | 218. |
| In12-218 | TTATATGTAATTCTACTATAATT | Cpf1/Cas12f | 219. |
| In12-219 | AATGAGCACATTTGTTAAAATAG | Cpf1/Cas12f | 220. |
| In12-220 | AAATTATAGTAGAATTACATATA | Cpf1/Cas12f | 221. |
| In12-221 | TTAAAATAGTTTTTAAGATTTGT | Cpf1/Cas12f | 222. |
| In12-222 | ACAAATGTGCTCATTTAAAATTA | Cpf1/Cas12f | 223. |
| In12-223 | AGATTTGTTAAAGAGAAAAAGAG | Cpf1/Cas12f | 224. |
| In12-224 | TTAAAGAGAAAAAGAGCTCCAGC | Cpf1/Cas12f | 225. |
| In12-225 | ACAAATCTTAAAAACTATTTTAA | Cpf1/Cas12f | 226. |
| In12-226 | TCTTTAACAAATCTTAAAAACTA | Cpf1/Cas12f | 227. |
| In12-227 | TGTTACATATGCTGGAGCTCTTT | Cpf1/Cas12f | 228. |
| In12-228 | CATTAAGCATTTTTCTTTGCATT | Cpf1/Cas12f | 229. |
| In12-229 | TTTGCATTAAGTAATAATTAAAA | Cpf1/Cas12f | 230. |
| In12-230 | CATTAAGTAATAATTAAAAATTT | Cpf1/Cas12f | 231. |
| In12-231 | ATTATTACTTAATGCAAAGAAAA | Cpf1/Cas12f | 232. |
| In12-232 | TGAAGTTCATCGCAAACAGTTGT | Cpf1/Cas12f | 233. |
| In12-233 | CGATGAACTTCATAAATTTTTAA | Cpf1/Cas12f | 234. |
| In12-234 | ATATACAACTGTTTGCGATGAAC | Cpf1/Cas12f | 235. |
| In12-235 | GCTTTAATATACAACTGTTTGCG | Cpf1/Cas12f | 236. |
| In12-236 | ATTTAGCTTTAATATACAACTGT | Cpf1/Cas12f | 237. |
| In12-237 | AGAGTAAGATTGGCCCCCTATGG | Cpf1/Cas12f | 238. |
| In12-238 | TCACAAGCAATGCCATAGGGGGC | Cpf1/Cas12f | 239. |
| In12-239 | TGTTCGTATCATCTGCAGTAGCA | Cpf1/Cas12f | 240. |
| In12-240 | TGTCTCGTCTATCTTGAATGAAA | Cpf1/Cas12f | 241. |
| In12-241 | ATTCAAGATAGACGAGACACAAA | Cpf1/Cas12f | 242. |
| In12-242 | CCATCCTCACCTTTTAAATATAT | Cpf1/Cas12f | 243. |
| In12-243 | AAAGGTGAGGATGGGAAAATGAT | Cpf1/Cas12f | 244. |

TABLE 2
Target sequences of exemplary sgRNA-R targeting USH2A
exon 13, Reference genome: Human GRCh38 (NCBI RefSeq NC_000001.11)
chr1: 216246565-216247246.

| | | | SEQ ID |
|---|---|---|---|
| sgRNA NO. | targetSeq | CRISPR protein | NO: |
| Ex13-1 | CTGTGTGTGCCTAATCGTCA | SpCas9 | 245. |
| Ex13-2 | CCTTGCAAATTAGGGGTAAC | SpCas9 | 246. |
| Ex13-3 | CTTGACGATTAGGCACACAC | SpCas9 | 247. |
| Ex13-4 | CTCCGAAGCTTTAATGATGT | SpCas9 | 248. |
| Ex13-5 | CCTGTTACCCCTAATTTGCA | SpCas9 | 249. |
| Ex13-6 | CACCTTCTTCCTTGACGATT | SpCas9 | 250. |
| Ex13-7 | GATTCCTTGGGGACATTACC | SpCas9 | 251. |
| Ex13-8 | AGGTGTAATCAGTGTCAACC | SpCas9 | 252. |
| Ex13-9 | ACTGTCTGTAATGCTAAGAC | SpCas9 | 253. |
| Ex13-10 | CCAGTCTTATCACAGTTGCA | SpCas9 | 254. |
| Ex13-11 | ACAGTCACAGGCCTTACAAT | SpCas9 | 255. |
| Ex13-12 | GGAAAGAATTATTTTGCCGT | SpCas9 | 256. |
| Ex13-13 | CCTTGCAACTGTGATAAGAC | SpCas9 | 257. |
| Ex13-14 | GTTAGATGTCACCAATTGTA | SpCas9 | 258. |
| Ex13-15 | ATGGTCAAATTGTACCTGTG | SpCas9 | 259. |
| Ex13-16 | CCATGGAGGTTACACTGGCA | SpCas9 | 260. |
| Ex13-17 | GCCATGGAGGTTACACTGGC | SpCas9 | 261. |
| Ex13-18 | TAGCATTACAGACAGTCCCA | SpCas9 | 262. |
| Ex13-19 | ATTGGGTCACAAATGGTCCC | SpCas9 | 263. |
| Ex13-20 | ATTCCTTGGGGACATTACCT | SpCas9 | 264. |
| Ex13-21 | CTGTCTGTAATGCTAAGACA | SpCas9 | 265. |
| Ex13-22 | CTTGCAACTGTGATAAGACT | SpCas9 | 266. |
| Ex13-23 | ACAGGCACTGGCCACTGATT | SpCas9 | 267. |
| Ex13-24 | ACCATTTGTGACCCAATCAG | SpCas9 | 268. |
| Ex13-25 | TGCCTAATCGTCAAGGAAGA | SpCas9 | 269. |
| Ex13-26 | GGTGTCACACTGAAGTCCTT | SpCas9 | 270. |
| Ex13-27 | ATCTGCAAGCCCAATGTTGA | SpCas9 | 271. |
| Ex13-28 | GCCACTGATTGGGTCACAAA | SpCas9 | 272. |
| Ex13-29 | CACTGTCTCCCTTCAACATT | SpCas9 | 273. |
| Ex13-30 | TGGAGGGAAACTTCTACCTA | SpCas9 | 274. |
| Ex13-31 | CTGCTGTGTAACAAATCAAC | SpCas9 | 275. |
| Ex13-32 | ACAATGTCCTTGCAAATTAG | SpCas9 | 276. |
| Ex13-33 | GTAATCAGTGTGAGCCTCAC | SpCas9 | 277. |
| Ex13-34 | CTGAGCCATGGAGGTTACAC | SpCas9 | 278. |
| Ex13-35 | GCACTGTCTCCCTTCAACAT | SpCas9 | 279. |
| Ex13-36 | GACAATGTCCTTGCAAATTA | SpCas9 | 280. |
| Ex13-37 | AAATTCTGCAATCCTCACTC | SpCas9 | 281. |
| Ex13-38 | GGACAATGTCCTTGCAAATT | SpCas9 | 282. |
| Ex13-39 | CACAGGCACTGGCCACTGAT | SpCas9 | 283. |
| Ex13-40 | AGGAATCACACTCACACATC | SpCas9 | 284. |
| Ex13-41 | GGTCCCAGGTAATGTCCCCA | SpCas9 | 285. |
| Ex13-42 | CCCTGCCAGTGTAACCTCCA | SpCas9 | 286. |
| Ex13-43 | GATAAGACTGGGACAATAAA | SpCas9 | 287. |
| Ex13-44 | AGGTGTGATCATTGCAATTT | SpCas9 | 288. |
| Ex13-45 | GATGTGTGAGTGTGATTCCT | SpCas9 | 289. |
| Ex13-46 | ATTTGTTCACTGAGCCATGG | SpCas9 | 290. |
| Ex13-47 | GACACAGCTGGATCCCTCCC | SpCas9 | 291. |
| Ex13-48 | CAGTGCAATAAATGTTTGGA | SpCas9 | 292. |
| Ex13-49 | ATCCAACATCATTAAAGCTT | SpCas9 | 293. |
| Ex13-50 | AGAATTTGTTCACTGAGCCA | SpCas9 | 294. |
| Ex13-51 | CCCATAAAAGTTTTCTCTGC | SpCas9 | 295. |
| Ex13-52 | AATTCTGCAATCCTCACTCT | SpCas9 | 296. |
| Ex13-53 | CCTGCAGAGAAAACTTTTAT | SpCas9 | 297. |
| Ex13-54 | CATTACAGACAGTCCCAGGG | SpCas9 | 298. |
| Ex13-55 | GAGACAGTGCAATAAATGTT | SpCas9 | 299. |
| Ex13-56 | TTAGCATTACAGACAGTCCC | SpCas9 | 300. |
| Ex13-57 | ACAGTGCAATAAATGTTTGG | SpCas9 | 301. |
| Ex13-58 | CACTCACACTGCCCAGAGTG | SpCas9 | 302. |
| Ex13-59 | TCTGCAAGCCCAATGTTGAA | SpCas9 | 303. |
| Ex13-60 | TAATACATTTCTTTCTTACC | SpCas9 | 304. |
| Ex13-61 | ATGTGTGAGTGTGATTCCTT | SpCas9 | 305. |
| Ex13-62 | TGTGTGAGTGTGATTCCTTG | SpCas9 | 306. |
| Ex13-63 | ATTACAGACAGTCCCAGGGA | SpCas9 | 307. |
| Ex13-64 | TCCAGCTGTGTCACAGTCAC | SpCas9 | 308. |
| Ex13-65 | ACACAGCTGGATCCCTCCCT | SpCas9 | 309. |
| Ex13-66 | ACCTGCAGAGAAAACTTTTA | SpCas9 | 310. |
| Ex13-67 | GCCTGTGACTGTGACACAGC | SpCas9 | 311. |
| Ex13-68 | GATTAGGCACACACAGGCAC | SpCas9 | 312. |
| Ex13-69 | ATATTTTATCTTTAGGGCTT | SpCas9 | 313. |
| Ex13-70 | CACAGTTGCAAGGCAGACAG | SpCas9 | 314. |
| Ex13-71 | GAGTGCAAAAAAGAAGCCAA | SpCas9 | 315. |
| Ex13-72 | GCAGTGTTGAAAATTGTCAA | SpCas9 | 316. |
| Ex13-73 | TTAGGGGTAACAGGTCTTCGC | KKH-SaCas9 | 317. |
| Ex13-74 | GCACTGGCCACTGATTGGGTC | KKH-SaCas9 | 318. |
| Ex13-75 | CCAACATCATTAAAGCTTCGG | KKH-SaCas9 | 319. |
| Ex13-76 | GAGGGAAACTTCTACCTACGG | KKH-SaCas9 | 320. |
| Ex13-77 | TTACAGCGAAGACCTGTTACC | KKH-SaCas9 | 321. |
| Ex13-78 | TGGTCCCAGGTAATGTCCCCA | KKH-SaCas9/SaCas9 | 322. |
| Ex13-79 | GGAAACTTCTACCTACGGCAA | KKH-SaCas9 | 323. |
| Ex13-80 | ACAGGGCAGTGCATCTGCAAG | KKH-SaCas9 | 324. |
| Ex13-81 | GTAACCTCCATGGCTCAGTGA | KKH-SaCas9 | 325. |
| Ex13-82 | ATTACCTGGGACCATTTGTGA | KKH-SaCas9 | 326. |
| Ex13-83 | CTGCCAGTGTAACCTCCATGG | KKH-SaCas9 | 327. |
| Ex13-84 | AATTGGTGACATCTAACCCAT | KKH-SaCas9 | 328. |
| Ex13-85 | GTCACAGTCACAGGCCTTACA | KKH-SaCas9 | 329. |
| Ex13-86 | GGATCCCTCCCTGGGACTGTC | KKH-SaCas9 | 330. |
| Ex13-87 | ATGATGTTGGATGTGAGCCCT | KKH-SaCas9 | 331. |
| Ex13-88 | CACTGCCCAGAGTGAGGATTG | KKH-SaCas9/SaCas9 | 332. |
| Ex13-89 | CTGCCCTGTCTTAGCATTACA | KKH-SaCas9 | 333. |
| Ex13-90 | TGTCCTTGCAAATTAGGGGTA | KKH-SaCas9 | 334. |
| Ex13-91 | AATTCTGCAATCCTCACTCTG | KKH-SaCas9 | 335. |
| Ex13-92 | ATCACACCTAAGCCCTAAAGA | KKH-SaCas9 | 336. |
| Ex13-93 | TGCACTCACACTGCCCAGAGT | KKH-SaCas9/SaCas9 | 337. |
| Ex13-94 | CTGTCTGTAATGCTAAGACAG | KKH-SaCas9 | 338. |
| Ex13-95 | ACTCACACATCTGGCAGTGTT | KKH-SaCas9 | 339. |
| Ex13-96 | GCAATCCTCACTCTGGGCAGT | KKH-SaCas9/SaCas9 | 340. |
| Ex13-97 | CTGTGTCACAGTCACAGGCCT | KKH-SaCas9 | 341. |
| Ex13-98 | TTCTCCGAAGCTTTAATGATG | KKH-SaCas9/SaCas9 | 342. |
| Ex13-99 | AATTGTACCTGTGAGGCTCAC | KKH-SaCas9 | 343. |
| Ex13-100 | GTGTGCCTAATCGTCAAGGAA | KKH-SaCas9 | 344. |
| Ex13-101 | CATGGCTCAGTGAACAAATTC | KKH-SaCas9 | 345. |
| Ex13-102 | GCTGTAATCAGTGTGAGCCTC | KKH-SaCas9 | 346. |
| Ex13-103 | CTGGCCACTGATTGGGTCACA | KKH-SaCas9 | 347. |
| Ex13-104 | TTTTCTCTGCAGGTGTCACAC | KKH-SaCas9 | 348. |
| Ex13-105 | ATTGGGTCACAAATGGTCCCA | KKH-SaCas9 | 349. |
| Ex13-106 | CTGATTGGGTCACAAATGGTC | KKH-SaCas9 | 350. |
| Ex13-107 | CCATTTGTGACCCAATCAGTG | KKH-SaCas9 | 351. |
| Ex13-108 | TTAGGTGTGATCATTGCAATT | KKH-SaCas9/SaCas9 | 352. |
| Ex13-109 | GGATTTAAATTTCTCCGAAGC | KKH-SaCas9 | 353. |
| Ex13-110 | AGGCCTGTGACTGTGACACAG | KKH-SaCas9/SaCas9 | 354. |
| Ex13-111 | GCAAGCCCAATGTTGAAGGGA | KKH-SaCas9 | 355. |
| Ex13-112 | CACACAGGCACTGGCCACTGA | KKH-SaCas9/SaCas9 | 356. |
| Ex13-113 | TTAGGGCTTAGGTGTGATCAT | KKH-SaCas9 | 357. |
| Ex13-114 | TTCCTCTGTCTGCCTTGCAAC | KKH-SaCas9 | 358. |
| Ex13-115 | CACAGGTACAATTTGACCATT | KKH-SaCas9 | 359. |
| Ex13-116 | AGAAGGTGTAATCAGTGTCAA | KKH-SaCas9 | 360. |
| Ex13-117 | CTTTTTTGCACTCACACTGCC | KKH-SaCas9/SaCas9 | 361. |
| Ex13-118 | GCATTACAGACAGTCCCAGGG | KKH-SaCas9/SaCas9 | 362. |
| Ex13-119 | TCTCCCTTCAACATTGGGCTT | KKH-SaCas9 | 363. |
| Ex13-120 | AGGCACACACAGGCACTGGCC | KKH-SaCas9 | 364. |
| Ex13-121 | AGAATTTGTTCACTGAGCCAT | KKH-SaCas9 | 365. |
| Ex13-122 | CCTAATCGTCAAGGAAGAAGG | KKH-SaCas9 | 366. |
| Ex13-123 | AATCAGTGTGAGCCTCACAGG | KKH-SaCas9 | 367. |
| Ex13-124 | CAATGATCACACCTAAGCCCT | KKH-SaCas9 | 368. |
| Ex13-125 | ATTTTATCTTTAGGGCTTAGG | KKH-SaCas9 | 369. |
| Ex13-126 | TAAATGGCTCTCTGCTGTGTA | KKH-SaCas9 | 370. |
| Ex13-127 | CTGGCAGTGTTGAAAATTGTC | KKH-SaCas9 | 371. |
| Ex13-128 | CATCTGGCAGTGTTGAAAATT | KKH-SaCas9 | 372. |
| Ex13-129 | CAACACTGCCAGATGTGTGAG | KKH-SaCas9 | 373. |
| Ex13-130 | AGCTTCGGAGAAATTTAAATC | KKH-SaCas9 | 374. |
| Ex13-131 | AAGAATTATTTTGCCGTAGGT | KKH-SaCas9 | 375. |
| Ex13-132 | AATTTGCAAGGACATTGTCCT | KKH-SaCas9 | 376. |
| Ex13-133 | AGGAATCACACTCACACATCT | KKH-SaCas9 | 377. |
| Ex13-134 | AGGACAATGTCCTTGCAAATT | KKH-SaCas9/SaCas9 | 378. |
| Ex13-135 | AGTGGCCAGTGCCTGTGTGTG | KKH-SaCas9 | 379. |
| Ex13-136 | TTTAAATTTCTCCGAAGCTTT | KKH-SaCas9 | 380. |
| Ex13-137 | ATGTTGAAGGGAGACAGTGCA | KKH-SaCas9 | 381. |
| Ex13-138 | TTGCAACTGTGATAAGACTGG | KKH-SaCas9 | 382. |
| Ex13-139 | AACTGTGATAAGACTGGGACA | KKH-SaCas9 | 383. |
| Ex13-140 | TGCTGTGTAACAAATCAACAG | KKH-SaCas9 | 384. |
| Ex13-141 | TCATTAAAGCTTCGGAGAAAT | KKH-SaCas9 | 385. |
| Ex13-142 | CAGCAGAGAGCCATTTATTGT | KKH-SaCas9 | 386. |
| Ex13-143 | TCAGTGTCAACCAGGTAAGAA | KKH-SaCas9 | 387. |
| Ex13-144 | CAGGGAGGGATCCAGCTGTGT | KKH-SaCas9 | 388. |
| Ex13-145 | AATCAACAGGACAATGTCCTT | KKH-SaCas9 | 389. |
| Ex13-146 | ACACCTGCAGAGAAAACTTTT | KKH-SaCas9/SaCas9 | 390. |
| Ex13-147 | CATTTATTGTCCCAGTCTTAT | KKH-SaCas9 | 391. |
| Ex13-148 | ATTTTCAACACTGCCAGATGT | KKH-SaCas9/SaCas9 | 392. |
| Ex13-149 | AGTTGCAAGGCAGACAGAGGA | KKH-SaCas9/SaCas9 | 393. |
| Ex13-150 | AGTGTTGAAAATTGTCAATGG | KKH-SaCas9 | 394. |
| Ex13-151 | CCCAATGTTGAAGGGAGACAG | KKH-SaCas9 | 395. |
| Ex13-152 | TTTCTTTCTTACCTGGTTGAC | KKH-SaCas9 | 396. |
| Ex13-153 | AATATATTTTATCTTTAGGGC | KKH-SaCas9 | 397. |
| Ex13-154 | CATTGACAATTTTCAACACTG | KKH-SaCas9 | 398. |
| Ex13-155 | TAACCCATAAAAGTTTTCTCT | KKH-SaCas9 | 399. |
| Ex13-156 | TGCAGAGAAAACTTTTATGGG | KKH-SaCas9 | 400. |
| Ex13-157 | GTGATCATTGCAATTTTGGAT | KKH-SaCas9 | 401. |
| Ex13-158 | GCAAAAAAGAAGCCAAAGGAC | KKH-SaCas9 | 402. |
| Ex13-159 | GAAATTTAAATCCAAAATTGC | KKH-SaCas9 | 403. |
| Ex13-160 | ACTGATTACACCTTCTTCCTT | KKH-SaCas9 | 404. |
| Ex13-161 | AGAGGAAAGAATTATTTTGCC | KKH-SaCas9 | 405. |
| Ex13-162 | GGAGAAATTTAAATCCAAAAT | KKH-SaCas9 | 406. |
| Ex13-163 | TCTTTAGGGCTTAGGTGTGATCA | Cpf1/Cas12f | 407. |
| Ex13-164 | GGGCTTAGGTGTGATCATTGCAA | Cpf1/Cas12f | 408. |
| Ex13-165 | GATTTAAATTTCTCCGAAGCTTT | Cpf1/Cas12f | 409. |
| Ex13-166 | AATTTCTCCGAAGCTTTAATGAT | Cpf1/Cas12f | 410. |
| Ex13-167 | AATCCAAAATTGCAATGATCACA | Cpf1/Cas12f | 411. |
| Ex13-168 | TCCGAAGCTTTAATGATGTTGGA | Cpf1/Cas12f | 412. |
| Ex13-169 | ATGATGTTGGATGTGAGCCCTGC | Cpf1/Cas12f | 413. |
| Ex13-170 | TTCACTGAGCCATGGAGGTTACA | Cpf1/Cas12f | 414. |
| Ex13-171 | CACTCACACTGCCCAGAGTGAGG | Cpf1/Cas12f | 415. |
| Ex13-172 | GCTTCTTTTTTGCACTCACACTG | Cpf1/Cas12f | 416. |
| Ex13-173 | TCTGCAGGTGTCACACTGAAGTC | Cpf1/Cas12f | 417. |
| Ex13-174 | TGGGTTAGATGTCACCAATTGTA | Cpf1/Cas12f | 418. |
| Ex13-175 | TTGCACTGTCTCCCTTCAACATT | Cpf1/Cas12f | 419. |
| Ex13-176 | GAGGGAAACTTCTACCTACGGCA | Cpf1/Cas12f | 420. |
| Ex13-177 | CCTCCAAACATTTATTGCACTGT | Cpf1/Cas12f | 421. |
| Ex13-178 | CCGTAGGTAGAAGTTTCCCTCCA | Cpf1/Cas12f | 422. |
| Ex13-179 | CTCTGTCTGCCTTGCAACTGTGA | Cpf1/Cas12f | 423. |
| Ex13-180 | TTGTCCCAGTCTTATCACAGTTG | Cpf1/Cas12f | 424. |
| Ex13-181 | TTACACAGCAGAGAGCCATTTAT | Cpf1/Cas12f | 425. |
| Ex13-182 | CAAGGACATTGTCCTGTTGATTT | Cpf1/Cas12f | 426. |
| Ex13-183 | ACCATTGACAATTTTCAACACTG | Cpf1/Cas12f | 427. |
| Ex13-184 | AACACTGCCAGATGTGTGAGTGT | Cpf1/Cas12f | 428. |
| Ex13-185 | TGACCCAATCAGTGGCCAGTGCC | Cpf1/Cas12f | 429. |
| Ex13-186 | TTACCTGGTTGACACTGATTACA | Cpf1/Cas12f | 430. |
| Ex13-187 | TTTCTTACCTGGTTGACACTGAT | Cpf1/Cas12f | 431. |

### AAV Delivery Systems

[0080] The methods include delivery of a CRISPR/Cas9 genome editing system, including a Cas9 nuclease and one or two guide RNAs, to a subject in need thereof. The delivery methods can include, e.g., viral delivery, preferably using an adeno-associated virus (AAV) vector that encodes the Cas9 and one or more guide RNA(s). AAV is a naturally occurring defective virus that requires another virus, such as an adenovirus or a herpes virus, as a helper virus for efficient replication and a productive life cycle. (For a review, see Muzyczka et al., Curr. Topics in Micro and Immunol. 158:97-129 (1992)). AAV vectors efficiently transduce various cell types and can produce long-term expression of transgenes in vivo. AAV vectors have been extensively used for gene augmentation or replacement and have shown therapeutic efficacy in a range of animal models as well as in the clinic; see, e.g., Mingozzi and High, Nature Reviews Genetics 12, 341-355 (2011); Deyle and Russell, Curr Opin Mol Ther. 2009 August; 11 (4): 442-447; Asokan et al., Mol Ther. 2012 April; 20 (4): 699-708. AAV vectors containing as little as 300 base pairs of AAV can be packaged and can produce recombinant protein expression. For example, AAV2, AAV5, AAV2/5, AAV2/8 and AAV2/7 vectors have been used to introduce DNA into photoreceptor cells (see, e.g., Pang et al., Vision Research 2008, 48 (3): 377-385; Khani et al., Invest Ophthalmol Vis Sci. 2007 September; 48 (9): 3954-61; Allocca et al., J. Virol. 2007 81 (20): 11372-11380). In some embodiments, the AAV vector can include (or include a sequence encoding) an AAV capsid polypeptide described in PCT/US2014/060163; for example, a virus particle comprising an AAV capsid polypeptide having an amino acid sequence selected from the group consisting of SEQ ID NOs: 1, 3, 5, 7, 9, 11, 13, 15, and 17 of PCT/US2014/060163, and a Cas9 sequence and guide RNA sequence as described herein. In some embodiments, the AAV capsid polypeptide is an Anc80 polypeptide, e.g., Anc80L27; Anc80L59; Anc80L60; Anc80L62; Anc80L65; Anc80L33; Anc80L36; or Anc80L44. In some embodiments, the AAV incorporates inverted terminal repeats (ITRs) derived from the AAV2 serotype. Exemplary left and right ITRs are presented in Table 6 of WO 2018/026976. It should be noted, however, that numerous modified versions of the AAV2 ITRs are used in the field, and the ITR sequences shown below are exemplary and are not intended to be limiting. Modifications of these sequences are known in the art, or will be evident to skilled artisans, and are thus included in the scope of this disclosure.

[0081] Cas9 expression can be driven by a promoter known in the art. In some embodiments, expression is driven by one of three promoters: cytomegalovirus (CMV), elongation factor-1 (EFS), or human g-protein receptor coupled kinase-1 (hGRK1), which is specifically expressed in retinal photoreceptor cells. Nucleotide sequences for each of these promoters are provided in Table 5 of WO 2018/026976. Modifications of these sequences may be possible or desirable in certain applications, and such modifications are within the scope of this disclosure.

[0082] Expression of the gRNAs in the AAV vector is driven by a promoter known in the art. In some embodiments, a polymerase III promoter, such as a human U6 promoter. An exemplary U6 promoter sequence is presented below:

(SEQ ID NO: 436)
AAGGTCGGGCAGGAAGAGGGCCTATTTCCCATGATTCCTTCATATTTGC
ATATACGATACAAGGCTGTTAGAGAGATAATTAGAATTAATTTGACTGT
AAACACAAAGATATTAGTACAAAATACGTGACGTAGAAAGTAATAATTT
CTTGGGTAGTTTGCAGTTTTAAAATTATGTTTTAAAATGGACTATCATA
TGCTTACCGTAACTTGAAAGTATTTCGATTTCTTGGCTTTATATATCTT
GTGGAAAGGACGAAACACC.

[0083] In some embodiments, the nucleic acid or AAV vector shares at least 80%, 85%, 90%, 95%, 96%, 97%, 98%, 99% or greater sequence identity with one of the nucleic acids or AAV vectors recited above

[0084] The AAV genomes described above can be packaged into AAV capsids (for example, AAV5 capsids), which capsids can be included in compositions (such as pharmaceutical compositions) and/or administered to subjects. An exemplary pharmaceutical composition comprising an AAV capsid according to this disclosure can include a pharmaceutically acceptable carrier such as balanced saline solution (BSS) and one or more surfactants (e.g., Tween 20) and/or a thermosensitive or reverse-thermosensitive polymer (e.g., pluronic). Other pharmaceutical formulation elements known in the art may also be suitable for use in the compositions described here.

[0085] Compositions comprising AAV vectors according to this disclosure can be administered to subjects by any suitable means, including without limitation injection, for example, subretinal injection or injection through the round window. The concentration of AAV vector within the composition is selected to ensure, among other things, that a sufficient AAV dose is administered to the retina or inner ear of the subject, taking account of dead volume within the injection apparatus and the relatively limited volume that can be safely administered. Suitable doses may include, for example, 1×10¹¹ viral genomes (vg)/mL, 2×10¹¹ viral genomes (vg)/mL, 3×10¹¹ viral genomes (vg)/mL, 4×10¹¹ viral genomes (vg)/mL, 5×10¹¹ viral genomes (vg)/mL, 6×10¹¹ viral genomes (vg)/mL, 7×10¹¹ viral genomes (vg)/mL, 8×10¹¹ viral genomes (vg)/mL, 9×10¹¹ viral genomes (vg)/mL, 1×10¹² vg/mL, 2×10¹² viral genomes (vg)/mL, 3×10¹² viral genomes (vg)/mL, 4×10¹² viral genomes (vg)/mL, 5×10¹² viral genomes (vg)/mL, 6×10¹² viral genomes (vg)/mL, 7×10¹² viral genomes (vg)/mL, 8×10¹² viral genomes (vg)/mL, 9×10¹² viral genomes (vg)/mL, 1×10¹³ vg/mL, 2×10¹³ viral genomes (vg)/mL, 3×10¹³ viral genomes (vg)/mL, 4×10¹³ viral genomes (vg)/mL, 5×10¹³ viral genomes (vg)/mL, 6×10¹³ viral genomes (vg)/mL, 7×10¹³ viral genomes (vg)/mL, 8×10¹³ viral genomes (vg)/mL, or 9×10¹³ viral genomes (vg)/mL. Any suitable volume of the composition may be delivered to the subretinal or cochlear space. In some instances, the volume is selected to form a bleb in the subretinal space, for example 1 microliter, 10 microliters, 50 microliters, 100 microliters, 150 microliters, 200 microliters, 250 microliters, 300 microliters, etc.

[0086] Any region of the retina may be targeted, though the fovea (which extends approximately 1 degree out from the center of the eye) may be preferred in certain instances due to its role in central visual acuity and the relatively high concentration of cone photoreceptors there relative to peripheral regions of the retina. Alternatively or additionally, injections may be targeted to parafoveal regions (extending between approximately 2 and 10 degrees off center), which are characterized by the presence of all three types of retinal photoreceptor cells. In addition, injections into the parafoveal region may be made at comparatively acute angles using needle paths that cross the midline of the retina. For instance, injection paths may extend from the nasal aspect of the sclera near the limbus through the vitreal chamber and into the parafoveal retina on the temporal side, from the temporal aspect of the sclera to the parafoveal retina on the nasal side, from a portion of the sclera located superior to the cornea to an inferior parafoveal position, and/or from an inferior portion of the sclera to a superior parafoveal position. The use of relatively small angles of injection relative to the retinal surface may advantageously reduce or limit the potential for spillover of vector from the bleb into the vitreous body and, consequently, reduce the loss of the vector during delivery. In other cases, the macula (inclusive of the fovea) can be targeted, and in other cases, additional retinal regions can be targeted, or can receive spillover doses.

[0087] For delivery to the inner ear, injection to the cochlear duct, which is filled with high potassium endolymph fluid, could provide direct access to hair cells. However, alterations to this delicate fluid environment may disrupt the endocochlear potential, heightening the risk for injection-related toxicity. The perilymph-filled spaces surrounding the cochlear duct, scala tympani and scala vestibuli, can be accessed from the middle ear, either through the oval or round window membrane (RWM). The RWM, which is the only non-bony opening into the inner ear, is relatively easily accessible in many animal models and administration of viral vector using this route is well tolerated. Administration through the oval window or across the tympanic membrane can also be used. See, e.g., WO2017100791 and U.S. Pat. No. 7,206,639.

[0088] For pre-clinical development purposes, systems, compositions, nucleotides and vectors according to this disclosure can be evaluated ex vivo using a human retinal explant system, or in vivo using an animal model such as a mouse, rabbit, pig, nonhuman primate, etc. Retinal explants are optionally maintained on a support matrix, and AAV vectors can be delivered by injection into the space between the photoreceptor layer and the support matrix, to mimic subretinal injection. Tissue for retinal explanation can be obtained from human or animal subjects, for example mouse.

[0089] Explants are particularly useful for studying the expression of gRNAs and/or Cas9 following viral transduction, and for studying genome editing over comparatively short intervals. These models also permit higher throughput than may be possible in animal models, and can be predictive of expression and genome editing in animal models and subjects. Small (mouse, rat) and large animal models (such as rabbit, pig, nonhuman primate) can be used for pharmacological and/or toxicological studies and for testing the systems, nucleotides, vectors and compositions of this disclosure under conditions and at volumes that approximate those that will be used in clinic. Because model systems are selected to recapitulate relevant aspects of human anatomy and/or physiology, the data obtained in these systems will generally (though not necessarily) be predictive of the behavior of AAV vectors and compositions according to this disclosure in human and animal subjects.

### EXAMPLES

[0090] The invention is further described in the following examples, which do not limit the scope of the invention described in the claims.

### Example 1

### Efficient Deletion of Mouse Ush2A Exon 12 Splicing Acceptor Using Paired-sgRNA in Mice Cells

[0091] Mouse organ of Corti HEI-OC1 cells were used as an in vitro cell line model to test the methods disclosed herein. HEI-OC1 cells are derived from mouse cochlea (Kalinec et al. (1999) Cell biology international 23 (3): 175-184; Kelley et al. (1993) Development 119 (4): 1041-1053). HEI-OC1 cells express USHERIN, making these cells particularly appropriate for these studies.

[0092] CRISPR/Cas9 genome editing technology was used to induce mouse exon 12 or human exon 13 skipping in Ush2a/USH2A transcripts. The LONZA 4D-Nucleofector™ was used to deliver Cas9/sgRNA protein complex in to the cells. Transfection programs were optimized following manufacturer's instruction (DS120, SG Cell Line 4D-Nucleofector™ X Kit). Purified sgRNA was incubated with Cas9 protein for 5 minutes before transfection. Media was replaced approximately 16 hours after nucleofection and cells were harvested for subsequent genomic DNA extraction after approximately 96 hours.

[0093] These results demonstrate that using CRISPR/Cas9 with a pair of sgRNAs, one targeting intron 11 and one targeting intron 12, can delete the full exon 12 from the mouse genome in HEI-OC1 cells. Different pairs of sgRNAs were screened, and one pair of sgRNAs was identified, sgL1/sgR1, which had 23.4% deletion efficiency (FIGS. 2A-C). Next, the genome editing strategy was redesigned, targeting the exon 12 splicing acceptor for removal, with this strategy referred to as an acceptor targeting paired-sgRNA strategy (FIG. 2E). The acceptor targeting paired-sgRNA strategy increased the genome editing efficiency, with the sgRNA pair sgL1 and sgK4 demonstrating an editing efficiency greater than 60% (FIG. 2D, 2F, 2G). RT-PCR analysis of the Ush2A transcripts showed that after genome editing the exon 12 skipping in-frame transcript were increased in OC1 cells (FIG. 2H, 2I). Exon 12 skipping was also observed in unedited HEI-OC1 cells, contrasted with human cells as spontaneous exon skipping has not been observed in human cells. These results demonstrate that the acceptor targeting paired-sgRNA strategy efficiently induces exon 12 skipping in mouse HEI-OC1 cells.

### Example 2

### Efficient Targeting at USH2A Exon 13 Loci Using Splicing Acceptor Targeting Strategy in Human Cells

[0094] In order to evaluate the acceptor targeting paired-sgRNA strategy in human cells, a human retinoblastoma-derived cell line (WERI-RB1) was used, as WERI-RB1 cells express USHERIN. Multiple paired-sgRNA combinations were screened to test the deletion efficiency at human USH2A exon 13, with each pair of sgRNAs including one sgRNA targeting human USH2A intron 12 and the other targeting exon 13 (FIG. 1). The removal of the exon 13 splicing acceptor by paired sgRNAs should abolish the recognition of the remaining exon 13 as an exon, with the production of a USH2A transcript with exon 13 skipped (FIG. 3D). SpCas9 protein and paired sgRNAs were combined to form RNPs and delivered into the cells by nucleofection. 48 hours later, genomic DNA was extracted from the cells. Next, PCR and next generation sequencing (NGS) were performed to evaluate the deletion efficiency at the USH2A locus. NGS analysis showed that the acceptor targeting paired-sgRNA strategy resulted in deletion efficiency of 69% for sgL1/sgK4 pair (having target sequences corresponding to SEQ ID NO: 17 and SEQ ID NO: 313, respectively) and 84% for sgL1/sgK5 pair (having target sequences corresponding to SEQ ID NO: 17 and SEQ ID NO: 260, respectively) (FIG. 3E-h). In contrast, the full exon 13 deletion strategy only reached an efficiency of ˜25% in exon 13 skipping (FIG. 3A-C).

[0095] Using RT-PCR, the percentage of in-frame exon 13 skipping in USH2A transcripts was evaluated after genome editing. Two pairs of primers were designed to detect wild type USH2A transcripts (E12-E13-E14) and the exon 13 skipping transcripts (E12-E14) (FIG. 4A). 96 hours after nucleofection, total RNA was extracted from approximately 10⁶ cells using the miRNeasy Mini Kit (QIAGEN, 217004). Next, first-strand cDNA was produced using PrimeScript™ RT reagent Kit with gDNA Eraser (Takara) with random hexamers, following the manufacturer's instructions. PCR was performed and results indicated that sgL1/sgK5 generated the highest exon 13 skipping induction efficiency (FIG. 4B). Sanger sequencing of shorter fragment from DNA gels confirmed in-frame exon 13 skipping. NGS was performed on cDNA reverse transcribed from the USH2A transcripts in order to analyse different types of USH2A transcripts generated by genome editing. The result showed that sgL1/sgK5 combination yielded the highest efficiency of exon 13-skipped in-frame USH2A transcripts: 73% of all the USH2A transcripts were exon 13-skipped in-frame transcripts (FIG. 4D-G). The NGS reads of sgL1/sgK4 and sgL1/sgK5 are shown in FIGS. 4H, 4I. These data demonstrate that the acceptor targeting paired-sgRNA strategy mediated USH2A exon 13 skipping with the production of in-frame USH2A transcripts in human cells.

### Example 3

### Efficient Induction of USH2A Exon 13-Skipped In-Frame Transcripts from the USH2A Patient-Derived hiPSCs

[0096] In order to test the acceptor targeting paired-sgRNA strategy in human cells carrying an USH2A exon 13 mutation, human induced pluripotent stem cells (hiPSCs) derived from a female USH2 patient were obtained. The cells carried homozygous c.2299delG mutations (FIG. 5A). c.2299delG mutation is located in human USH2A exon 13 and is the most frequent pathogenic mutation observed in Usher syndrome patients. sgL1/sgK5 sgRNAs were used to induce USH2A exon 13 skipping in c.2299delG hiPSCs. Several Cas9/sgL1/sgK5 RNP dosages were tested using nucleofection, with the results indicating dose-dependent deletion efficiency with the highest efficiency obtained at a dosage above 1000 nM (FIG. 5B). NGS analysis of genomic DNA extracted from edited hiPSCs indicated that 75% of reads included skipped exon 13 (FIG. 5C).

[0097] Because USH2A is not expressed in hiPSCs, in order to analyse USH2A transcripts after editing, the synergistic activation mediator (SAM) system was used to activate USH2A expression (FIG. 5D) in hiPSCs. PB-SAM donor plasmid (addgene, 102559) with the sgRNAs to activate USH2A expression was co-transfected with PiggyBac transposon vector (PB210PA, System Biosciences) in the c.2299delG hiPSCs after genome editing with the Cas9/sgL1/sgK5 RNP. Cells were cultured and selected in growth medium containing 10 g/mL Blasticidin. Total mRNA was isolated, cRNA was reverse transcribed, and NGS and RT-PCR were performed in order to analyze expressed USH2A transcripts with exon 13 skipped. Gel imaging showed 1000 nM RNP delivery of a pair of sgRNAs sgL1/sgK5 induced efficient USH2A exon 13 skipping (FIG. 5E), and NGS demonstrated 73% of all USH2A transcripts included in-frame skipping of exon 13. Taken together, these data demonstrate that the acceptor targeting paired-sgRNA strategy using the Cas9/sgL1/sgK5 RNP shows therapeutic potential for treating disease associated with mutations of USH2A exon 13 mutation by efficiently inducing in-frame exon 13 skipping.

### Example 4

### Efficient Exon Skipping in Human USH2A Patient Inner Ear Organoids

[0098] Wild-type hiPSCs, USH2A^{delG/delG} hiPSCs, and genome-edited USH2A^{delG/delG} hiPSCs were differentiated into inner ear organoids, which model human cochlea development in vivo. Differentiation of each of the three types of hiPSCs generated hair cell-containing inner ear organoids. On day 50, organoid samples were collected, total mRNA was extracted, and cDNA was reversed transcribed. RT-PCR performed on the cDNAs showed that in organoids generated from wild-type hiPSCs and from USH2A^{delG/delG} hiPSCs, only full length USH2A transcripts comprising exons 12, 13, and 14 were detected. In contrast, as shown by the gel image of FIG. 6A, in organoids generated from hiPSCs edited with Cas9/sgL1/sgK5 RNP, efficient exon 13 skipping was detected. As shown in FIG. 6B, the exon 13-skipped transcript accounts for over 75% of USH2A transcripts detected in organoids generated from hiPSCs edited with Cas9/sgL1/sgK5 RNP.

### Example 5

### Exon 5 Skipping in Ush2a Gene Causes Hearing Loss

[0099] Using the paired sgRNA genome editing strategy, AAV vectors targeting Ush2a exon 5 and exon 12 (which is equivalent to human USH2A exon 13) in the mice genome were designed. The AAVs vectors were administered to an Usher syndrome mouse model harborying a heterozygous Ush2a mutation (Ush2a^{+/-}). The hearing test demonstrated that exon 5 skipping, but not exon 12 skipping, can lead to hearing loss in the mouse model. This study indicated that the requirement of exon 5, but not exon 12, for functional USHERIN protein in normal hearing in the Usher syndrome mouse model.

### OTHER EMBODIMENTS

[0100] It is to be understood that while the invention has been described in conjunction with the detailed description thereof, the foregoing description is intended to illustrate and not limit the scope of the invention, which is defined by the scope of the appended claims. Other aspects, advantages, and modifications are within the scope of the following claims.

The application's sequence listing, which the Patent Office published only in electronic form, follows.

SEQUENCE LISTING (436 sequences)

SEQ ID NO: 1 - DNA, 800503 bp, Homo sapiens
  source 1..800503: mol_type = genomic DNA
tgtttgctctgcagaatactttacctgggcacccaagtcttccttccagcattcctgctgctacagcctatttgctgagtaaccaggggttacagcagcgttgccaggcaacgagggacagcggtcctgttgaagagccatttgtcacactgaggggactggttgaaatgcaataaagaaatggtaactcagcttatttatcaatacaattacttgcacagtattagggatccatgtgtaacctacaaattcatagtcatatgaggaaacacagaaacattttgctaaatattaaagcataggacagacagatggtgttgggtttctaatcagctttactctgagcttaaagttgctgcacatgctgggataaggggaaaggcccaaagtcctttgccagctttattttgggcatctgtaagttagctctgggttacaatgtacagtgcatgtgtaaagaaaatctacaagattcttttccctgttaagtagagctggtaatgccattgctaattccctggggtgaagtaacaacacaaaattattgtatgtgtaatatattattaataattatatatatataaaacacacacatatattatataaatatttatgtataactggttataaatattactggttgtcctgtggacttataaagtgcttgatttgcccaatgcaatcaagagatttaccaaaaggatgagtattttactctgagcactgtgcttcaaaatgttttttgagaagttcagtagtgttgcttctaggagctcaaagtcctcaggcctgggatgagcttcagttttaaaggtgcagcagctttcccttgacgccctacgtttttgattcccagataccagcagctactcatgtcttcgccattgctaagaacgtcgttggtattaccttactctgagaacgtgtctgcagtttccagaaaatggagtatcgcaacatcacttaaagtaccctgcttcaaagtattgctggcaagtggcgtgggcctgattatttatttagaaatgctttatcaggaggagaatgcttttttgtaaacatgaattgcccagttctttcattgggctctggcttcttgtttcaggtcattgaaatgttgatctttgcctattttgcttcaatatccttgactgagtcacgaggtcttttcccaaggctggagaacgtgggagctttcaagaaagtttccatcgtgccaacccaagcagtatgtggactcccagaccgaagcactttttgtcacagctctgctgctgctgaaagtattcagttctgtacccagcggttttgtattcaggattgcccatacagatcttcacaccctacctacactgcccttttctcagcaggcctcagtagctgcatcacaccagacaagaatgatctgcatcctaacgcccatagcaattctgcaagttttatttttggaaatcacaagagctgcttttcttctcctccttctccaaagctgatggcatcatttaccttagctgtatggctgaaacctgagcaacaaggtgtaatgtaagtagtagtgtaggtataagctttcataggtccccaaaaccagtagtagtgaagatcatttcagcctgaattccaaaccggaagtgaaggctatatagaattcatggtattgaagactaactcttccagttgtttccccaattaaaatttttttctcttctatggatgaaatggaccatgaaaaaaaatgtgaaaatagtttatcaaaggcaaatgtgtttatgcaggaatcatttattttctatagcttagcgcgacctttggtcttagccttcaaagcctaaagaagactcagagtgagttttaaggcatggaaacttgtaattaatacaaataattaatattttcaaaatcttgaactgggtttatataatcaacatttccttactagggtataacattttcattaggcagatagttctcccagtccttgggactgttttcttcatcctcgtttccccaagaagagctgtttgtttgactcatggaagatgttcagtaatataaattgaatatataaataaccctccatctctaaaaacatatagcttttagttctttatcttgtggtattttcattttccaattagttaggaaatatgtaggtaagtgtgagagattctcaaaagctttcatgctgttcatcccagagaaatgccttcaatgagtctgggtcttattactgccattttttgttatttaatcaccagtttttcattctgtaatcttttctcaagctgatatctaatgagtttcttctaaatatttattgccaacctggagattttaatatacaggacagttttgaggaatttttgcttatcttttttcttcctagagggcttttggccctttctcttgtgacattttctgtgtgtgacagcgttggctggatatctaaaaacttgtgaaacaaaccagaaaaggattacaatctcataagcaaataggacttaaatgtttttggtgtttagtttcaatttgccaagtgaaagttggcatgtcttcattttgttttaaatttggattaatcacaaaattaatcacaaaccattcccatttctacatctctcctcaaagaaaaccttgttttcttactgtttgaaattctagtaaattcaagctactcagtttatataattaacatctgaagagtcttaaaacattgtcttttgacaaatagggctaagataaaatatccttctgagcttgtagggacatatctgtaccaaattcatcttctattgacatcattttgtataaataagacagagaagtatttacagggttggaagaacatggttaatggttttgagagttccttgtatcaaggtcgtttccattttcaaaattaaaatacctttgggaattgggggaatttcggggtgtttgcactagataagtaaaacaaacaaaacatggattatccaattattgtttattcaggagcagaataaatccagttcctaaatattttgctacctgccttcctctcacatttattatctaccaaagctagtatgtttacaagcaaacaaaatagcaaggaagataatcaataacatattaagaaatgcattttcagtaagcttgggaaaataagtctgcatttggtaaatacattcttgagtaatggtcgaattctcacttgtagatttaaacagaagaaaaatgaataggggcaaactcttttcaggttaagacctgatgggtagggataaaaacaaattcacttcagtaaattagaaatattcaactactgaagggttaaaaatataatttgcagtagaatttatataaaacttttatttctacttatataaaacctttatgtcatctaaatctatttgcctaaattaaaaatatacttgcactcataactttataccaaatatacatacaaaatatagtaaaattgtgacagtaaatgagggactattagtgttttacaatcttattcttacctcccaactcaggaaaaaaatagatgcaagtgatagatgcaagtgagaagaaattatgtgtgaaaaacatgccctttaaggaaagctttaaaccatctttagcagtaattcttgattggctcaattttatacatttgcctctctgatacttcctaccaaatttgatcacaaactcatcattttttgagagactactgtatcctaggtgtttgtgtgtgtatcctcagaatactcatgatctaaatgatctaatggagtgtacagatggatgagtgttattacctaggcagcacagtgtgttaagtgagcacaaagtgagacccctcaaccgaccctgagcaggaagaagggtgccaggaccaagcataatcattcagataccaaagctaagtaggaggtaaccaggtgaagaagagacctcaaggtctgaaaggtgtgtcactctaataagggtagagataacttaaaataatttgataactgccctgacacaagacctggaagttttctgaaaactcttctagtttttcaaaatcttatttcactgtgttctagaaggctgaaggacctttcacctcagatatttaacatgatctcagtacctcagttggactgtacggtcatggagaggtagccagtcatcttacagacactggctttggctttgtgccagttgatgatggggtgagtagagactatagctgtccattcttcatttcaccatgggaattaaatagagtgattctgacttcagggctaccaatttagagccttccatggacactaaatttgctttacattaaaaaaaaatttttgcactgatgacttaatactcaagcggcctgtagtgtgttgtaccacttcctctaaaagaaatagcaggagaactaatgagccaataacctaaatgttagttttgcagaatgattcaaccactttagtttccatcatgaatctctaatgaagggtgctgaggctctggggaatatattgtaaataagaattctattttttattgaaataaaggggcttcttcattggaataaagctttcattgaatataatgacattcaggcacttattcatagtacaccattttgagcaaagtttgaggtcattttaacaccactgtaactgcacaataccttagcatgtctttttggttggatgctgaccttttctctcttttccggttgcttcctaaggtgtgttatagaaaagacagtagatgggcagattgtgttcaaacttacaatatctgagaaagagaccatgttttattatcgcacagtaaatggtttgcaacctccaataaaagtaatgacactggggagaattcttgtgaagaaatggattcatcttagtgtgcaggtgagtaaaataaaaaatatttaacatttggttaaacacaaggatttgtcttcctttctctcttttaaatggcatctactcacaaaatctgcagcagtatcttttagatttcaggtgtgtataaatgacaactaaagaagaaaaatatttaaatgacctaatgatgtatctcttgatatactagcatttcctcccccaaaattgctgtaaaagctctcacagaaacttaaagacaatgctatctgtaattgtaatatcctcagaaaatttttgttttcttgggttcgtatattctattttgtttaaaaatgtgtaagggctcatttgatgtctggtactaattttactagtcatggatgtattaataccccagcttgatttttacatctgtctttctcagcagctgatgatgtgaataaaatttgtctgttgcattaaaatggtgaccttagaactaatgaactttacacttgaggcactcaaaaggtgttatattattattttagttgtcaaccacagtttgtatgagccttagaagctgctaaaggctgagagagctgtgacatgtctggtatttacagtctccagaagagaggcacagttcatccttttgttttttcagggcactggaatggcccaatacagttaaagccacacctgcctttcaaaccaggtgtattagtccattcttccactactataaaaaataccggagactgggtaatttattataaagaaaagaggttcaattggctcatggttctgtgggctatacaggaagcatgattctggcatctgctcagcttctggggagaccttagaaaacttacaatcacggcagcagacaaaggctgagcaagcacttcatgtggccagaatagggaggaaaagaaagaaagggaggtacttcacacttttaaaccaccagatctcatgagaattctatcaggagactagcactaggtggatggtgttaaagtactgatgagaaaacgtctacatgttccaataacctcccatcaggccccaccaccaaagctggggattacaattggacatgaggtttgggtggggacacagagccaaatcatgtaacttggggtgctgggtaccacagtttccagtatgagctctcatatgagcatccatccagtggctcatgtgaacctcatttgaactagaggacatttacatccttgttcattttataaaaattatctttgatttctcacttttttttttttttttaatcttgaagcagataatgagtgtgcgtcctcagagggtcttgataattgttcattgttttggctttcagatactaagatatgagtttagcaaatgtgattggcaggggtcagagttttcatacacaactagggttgaaatgatacacaaaggggacgtcatgtctgacgtcaagccttgtgcataggacatgatggtttctgattctcaatgcttattctccatgtgttcagtagttaacagataggagaccaatttgtcctagtcttgaagtttccattgtcttgaagtctccattctgcccactgaccagtcctacagaattgggttttaatattaaaaacgtagaaatagaaacttttaaagacagtgccatctttgcagaagatgccaaatagatatgtttgttgcatatttttgtatcaacaatgacaaaaaaattatctttacttgcctttattttgtgttatctgtgaaactgtgccatgttttggcaggcagtagtacattaaaagcttcacaaagaaagtttaaaatctaaatgcagagcggtaaccatgactgaattactcccttggggataaaatgctcttagagtgcctactgaaatcagcattatcatttcaatacatgtcaaatatgagtcatttactagtttaggcaaaatttcttcatgaatctttaaatctttctcttctttcaagaaaaggttaaagtacttatgatttaatgagactgctttatttcataactgtttgactatcaagagaaaacttgtccttttcgatttgtacactcttttatttatttttttgcataagttttaaactattctgcattttatattaaaactacagaactaggcagtcacaaaatgttagaaaaccattcagatctgtcatttaatcatctagcacttattaaatatttgaggggtatgcagcattatgggaatctggatttattcaaatgaaaattaaagagcaattatttactctaaaatggagctctatataaggttcctttatattggacaacagtctgaatatgtttaaggtattatgaaatttataaaaatccatattatagatttttttttgagacagagtttctcccttgttgcccaggctggagtgcaatggcatgatcttggctcactgcaacctccgtctcctgagttcaagagattatcctgcctcagcctcccaagtagctgagattacaggtgcctacaaccacactggctaattttttgtatttttagtagagaaggagtttcaccattgttggccaggctggtctcgaattcctgacctcaggtgatccacctgccttggcctcccaaagtgatggtattacaggcatgagccagagtgcccagcctagattttgaaaaaggaatgtactgattactcaaaagttgttataagaaataatggaggccaggcgcagtggttcatgcctgtaatcccagcattttgggaggtagaagtgaacggatagctcgaaccaggagttcgaggccagcctgggcaacatggcaaaacctcatctctacgaaaaaacaccctaaaaaaattagccaggtgtgatggtgcgtgtctgtagacccagctactcaggaggttggggctaaagtgaaaagatcacctaagcctggaagtcaaggcttcagtgacccatgatcatgccactgcattccagcctgggcgaaagagcaagatcctgtctgaaaaaaaaaaaaaaaaaaaaaaaaagtgacaggaaggacaggagattaggagttgggaaatctgatttaggttatgctactctgtagtcttaagaataaaatttataggaatccatatgatagttgtttaataaggaatgtactaattgcttaaacgttgttataagaagtaatggaagctgggcacagtggctcacacctataccctgcccgccttgacgtctcaaactgagtcatttgactcagttttcctatttacataagaagattgaactagatgaacaaaatgagggccttttgaattcttcataaacaagtaagtggagtgtggagtgtagcacaagtcattaaagtatggcaagctgttgagttgtgtagggttatttaggtagtaagtgacagagccagccccattaaccaatgatcagtcttgtgctttttttctcttctcccatgctgcttggcatttacataaaaacatttttttgctagattttctggacaaaatatagagaaatgtagattgttactattccattgtataactgcaagaacatttccagaaaaaatattttagtataaaatgtaacttactgttgcatgattatataatgcatctaaactccatttaatttggggattagggacttttatcatgctgggcataggacagaacaaatgattaataatcttgtttagtcaagtttcaaactacaaacctgcactttatgtatatgtggattttcacccatcttccaaatggccacaaattgatgaatttatatagtgtgtgtgtttctgtgcatgtgaaaaaataaaacatacaactctattcgtggaatggcccagaaaccagaattttagttcgttgcttatagtgattttttactggttagcttatacctggtggcataaaattaattagcagatctcaacttatgctttatctcagacagttcacttgtatcagctttccatcagtaaaatcagaattctaatttaccaaaatcagaaaaaaaattattttaaataattaaatatctgggggaaaagatgtcaggaaatccagacataccaaaattggaaatcgaatttcctaaacaaacaaatagacaatatgctcaatattgctatggtaatgaatctcacagcttttattccaaaactagcattttaaagtgtcaatctgttggaaaatgattagtgtttaaattaatattcatttatggacttgaatctgacaggattgccaattgaaattttactttggggtttaatatattggctatttcaaattatatcaagctaaaattcattgtgtcattttttatactaaaactagaaaaaatcaattcatagtttttattatcatatagggaacactgatcatattagcaaaatttttaaagcttagttttcatattaaatcagcacatgctgtagttataagatttcctttggttactcttataaaagttttgaaatatgtaaaaaaatttactttagcatttcgttatggattggtaggtaaaacaatatggaaataagtatatgtgtttagtggcatttcatttaaaagtaaaactttagggttttctttgacaatatattttgccttaagcagttccacacattttatagcccaaatagtgtcaaagaatcatcagtatagtcatccttctagtaattatgcagaattgcagtaaaacaattactacgatttgaagctgatgaaatactacagctgtggaaccaagaaatgatttagcattgggcttgttcacattttctatgctattttcagggctccttgatacattgacaattcaagagccatagatgactctagctacaatagtgtgaaaaagagcagttctaatatgatacaatgaagaaaaaaatgcatgggtaaataaagttttaggaatcaatatatgaaggataggagtttcataatcacagttcatgaagtatgctcttttgatttatgtattcaatctaagaaagaaaaactattgatagttctggaggaaaacaaaatgcaatttaaccaacatttgttagaatagataaaccaagtctctcaattaatctctgaactgtatgcccatgtgcacactttataaaggtgtttccatgttcctattgattgagggaacataaaacatccatgtcaccttatggaagcctcctcattcagttcagtaagctttatggcatagaattgtcataggaataccatcccagccccactcccattctaagagaatctcaacccatattatttctttaatatatcattgcatttagctctgactctgtgtgtgtgtgtatgtgtgtgtaagtatgcatgcatatgtgtgctaaatgtttctttgtgcaaagccttctctttatatctagccagctgggttaacagctcaagttagttgaatagttttgggttattcaaaataaattaagatcaatagaatataatgaagtttttcagaacaatcagttacaaattatcatagctgctattaatcattgatttatgtgcactatattaaacatgttacatatttgcagttatacaatgaaatagtgacatgcttgtaacatgtttaatatagtgttaataatagctctgtgccactgacttatattatctccatgacagagattttaaaaaattagccttaggaaatttaaactacctgcctacatttatagtcccaagcttctctgaccttaaactaaaagtaataacttgccatgaacatgggtcactgagcagatctaaataatagtttttaaaattctccaaaccaaaaaaaaaaggcacagaatcccaaaagaactgaaaacatatatttataatgtaaatataattttgtatatttatacatatttgtaatataaatattttcaatgcttcagatatttacatgatttatacaaataattaaagtcaatatattttttaactatacccctcattgatacaagcaatttaaatgtacaacagaatgtaattttgtataaagttctgcgcaatattttcatgttttatggcagttgcgatagactacaatggcttaaagaaagaatatttcccttaagccagcctgatcacctgacccatgccttatagaatcaacccttattacaataaaatacaaagaaggaagcacttcctactttattatggaagaggtaaaaccatccaagtaaaaaagtaattattctctgtacgttttttgcatgtgattttaaaatgcaatatttaagcagaaggcaaggctttaattcttgaccttttagtaaaaaattgtgcaaccctgggaaaactatgtaactcctcaaaatgttaggatacccattacaaattggaaacaaacaaacttggcctatttagcttacaccataaatttgaacatataaagaaaatattgtctactaaaacactttatagcctataacttcctgctatgaaggagcttacagtctcttcagaggataagcaatcaaataattacacaaataaaggcaaaattataattgtggtaagtgctacatgatcacatgaagaatgatttggtcaaaccactgaagtcaagaaaagcttccttgagtaaatgttattgaatatgtgtattagttttctaggcctgtactaaaaaattatcacaaactggtggcttaacacaacagttaattcattgttgaagagttctggaggctagaaagctgaaatcaagttgttagaagggccatgctctttctgaaacctctagaatccttccttgtctcttccagcatctggtgtttgcacagacaccagagtatgtgattgtgctacctcctggggtttgtctgcccacagcaaggccgggaacccagaaaagaaaagaggagtgcccagtgtagccaccacccactgcatgagaaacagagctggcagcaatccttgatgctccttagcttgtagctacatcactccagcctctgtctgcattatcatatggtcctctcctctgatcgtgtgtgtcttctcttcttataaggacatcagttgtactggattaggattcttcctaattcggtaggactcatcttaacaattacatccaaaaagacactacccaaataaggtcagagtcacaggcacatagggttagggcttcagtatgacttttgatgggacacagttcaactgatagtaagatttattcaaaagaatgcataggatccaactgggcaaagagaattgataagaacattccataaatgcatagcaaatagtgtaaatgcccttgtataaaaagaaatatgttacatagactaaaaaaccaaagtggttagagtgtcgctggcaaagtgggacatggtgtgaaatgaggacagaacagtaggaagaggctatgtgttaaagagaatcactggatatgttaagattttttttttaaatggaactctattgaactgttttatgtgaaggacaggagatgagggatgaggataaggaaggaaaacgtatgatatgcacagattattttttcctaaagatcactttggctgcagtgagggagaatggtttgcttgaagacaagtgtgaagggttgttatggtattttcatggaccaagtcagatgtaagtgttacttacttacagcatgaagacaatagtgaatatgcaaatgaatggtcagctttgagaggagtttaagaattaaattaaagggcttgttgatgaaggaatatgtaatatgagggaaagggagttgatgaatcccagctttctggcttatgtaattgcaggtacagtgatttctttttctcaaatagaaatactggaagagaatcagattttggatgtggagcacatatgaattagattccagtttagggtaataattctcaactatagaaattattagcattattgagaaactttaaaaaatattctgatgtccatatccctttatgtcttcattggtctaggtggggcgcaggcattatttctttctttcttccttccctgatggatttaaaaaggtgtaacaaaagaaaatatcagtctaccattgatgagcatttaggttggttccatatctttgctattgtgaacagtgctgcaacgaatatacatgtgcatgcgtctttatgatagaatgactcagattcctttggatatatacgcaggaatggaattgctgggtataatggtagttctgttttttttggtctttgaggaattgtcacactgttttctgtaatggttgaagtaatttacactcccaacatcagcctattaagcattcctttttctctgcaacctcactagcactgttgtttcttgactttttaataacagacattctgactgatgtgagatggtatctttcattgtggttttgattgacattgctctgatgatcagcgatcatatgcttgttggccacatgtatgtcttcttttgaaaagggtctatttatgtcctttgcccactttttaatagggttgtttttttcttgtagatttgttgaagtttgttatagaggccagctatcagacctttgccagatgtatagtttgcaaaacttttctctcactctataggttatctgttcactctgttgatagttcgttttgctgtgcagaagctctttaatttaatttgatcccatttgtcattgcttttggcatctctgtcgtgaaatctttgcctgttcctatttcctatgtccagaatgctattgcctagattgtctttcaggcttttagttttgggttttacgtttaagtctttattccaacttgagttgatttttatatatggtataaggaaggggtccagtttcaatcttctgcatatggctagccagttatcccaacatttattgaatagggagtcctttccccattgcttgtttttgtcagctttctcaaagatcagatggtggtaggtgtgatggccttatttctgggctctctattctttttcttcggtctatgtgtctgtttttgtaccagattcatgctgttttgcttactgtagccctgtagtatagtttgcagtcaagtaatgcaatgcctccacctttgttatttttgtgtaggattctctgtctatttgggctcatttttggttttatatgaatttaaaaagtttttttctagttattccaagaatgtcgttgtttgtttgatagaaatagcactgaatctgtaaattgctttgggcaatatggccattttaacgatattggtccttcctattcatgagcatggaatgtcacacaaaccaatgatatctgtttgtgtcatctctgatttatttgagcagtgctttgcatttctcattgtacagatctttcccctccctggttaactgtattcctggtattttattctttttgtggcgattgtttcacctgcttctaatcaaatctatttagtagctgttattaaactgtgtagccattagtatacagtagtactccattacccttggctttgctttctgttgtttgtcacccacagtcaaccacagtctgaaaatatcaaatggaaaatttcagaagtaaacaattcataagttttaaattgggtgctgttctgtgtagtgtgatgacatgtgaggtggtcaccatacctcctgcctgggaggtgaagcatccctttgtccagcagcttctccatattgtctatgctcctagcccttcagtcacatagtagctctcttagtaatcagatcagctgttgctgtatcacagttgtaacttgtgttcaaggaaactgtatttcacttcttaatggccccaaagtgcaataatagtaatgctggcaatttggctatgccaagaagccataaagtccctcttttaagtgaaaaggtaaacactctcaacttaacaaatgaaagagaaaagatcatatgctgaaattactaagaacttcagtgtaagaatgtatcttctgtccatgaaattctgaacaatgtattgttataattattctattttgatagttattgttaatctcttactgggcctaatttataaaaattaaactttatcttgggtatgtatgtataggaaaaaacatagcatatattgggttcagtaatatccacggtttcaggcattcactgggagtcttgcaacatatcctcaatggataaagggggactactgtatgcgcaatatatgtatacgcttaaaaagagttttgtttagctagtgtgtgtaagaagattatcacaagtcacactgtagtgtttgccttttgccagtctgaatgttatcatcagtctaatattttatagcaaagatttaagttcattgaaaacttccctatggaaacacttccaatcaagacctacagcaagccatgaataaattaacatttaaacatgaaaactgatatttgaagaagaattagcaattaataatttctgctagaaaatggtggtttctcagccaatagctataaattgtataatatatgtaaaaggaaatatatacaaatatcatatgggacatatatcacatatactactaaaattgaaaattgctataaatagaagactatgttccaatgtccactgatttttttttttttaacaatctctagtcttgaaaatgccactatggtaattctgtcaaatttgtaatggttgggatttgatggtagtgcttttgaaacctgtattatctaatggaattgtcatttatattatatcattttcacctaaaagccaaatacaataagacttaaattatttttgctttttttgtggatagtcatttttgtgcccaaagggctaactgatgccttcagttatacatgaacaattcgcactaacgtcaggaagaacagtgtgcatataacctagggcagaatttggtctatggaatgtatcactcagtagtggaatggagattatgactttatttaaacatggacttgagtagttttatttttccttactgtttcccttggcatttctttctctaaagtgcaacattcaaaagtattctatgcagctgtagtgtcctggatgcataataagggcatatgttcaaggcaagtttaaatatccacataagccaaagacagagtaattaacattaaaaaaattaagacaacttttccaagaatgaaaagctttaatagattagctaattttagaattatttaacaacaactgtgaaaaattattagtatttacaaatatgtatatataaatatatgtaatgtcttatgttagacagcaatttcattctgctctctaatgattacatgacatacttctgaaaaaagtcaaacagtgtgttctagaaggacaaagaaataattggttcagttttgcttatacttagtgttcaattgttatcaacctggggtgggaggaagggaaagaaagagggaaggacagaagagagcaagaaaagaaggaaggaggagaggaaggagagatggaagtcatgtgacatagctagggatttggggcaaaattcaagacccatgttttccttgatggaaagccaaggaacctgagaaggagagtcagcccatgccaatttcactgtggtagaggtgaccaagaaagtttacattatggatgtatagtaggtaattttaggttgtttttgtctgggatataaacccattgtgttattccagttatttggccaaaatgttccatgcaaccattttggagtgctagcactttagggaatttataaaaaggggtggtgttcagtgtctgggttgaatacaaggtaggtagaaaaggacaatcaaaggaattagctgcaaatgagatgaaatctatgggaacatatattgagaaaactagtgaccattataatttaatcctctgaaatacctgcaacaatctgagaacaaggtaggtggcaagatgcatttataaatattaaagaaacacaagaccccatacactttgaaaactggggagtaccgaacttggagaggtctagtataggtagtgcttgttggtttgcatatttttaaaaccactttattgaggtctgattgacatagaaaagtctgtccatgttgcatgtatgcaacttaatgagtctaaagataaatatatgcccatgaaagtatcaccataatctgtggcataaacatatccacctatttgtttattcttaattaaactttttcctgagataattgtaggttcacaggcacttgtgagaaataatacagaagtcccatgtaccctttactcatttgttctcatcagtaacatcttttataactatggtacaatattacgaccaggatatggacattaatataaccaatattattcacatttcccatttttcatatattcctatgtgtatatgtttagatccatatgattttattaaaattttatccaccacagccgagttgcagaaaagttccatccctacaaggacacctcaagctgcctttttataaccatgcccactgtctcccttcccctactgctgccacaggtgtccctaacttctggcaaccactcacttgtactctatttctaaaatttggtcttttcaaaatgttgtatacatgacatcacacaatatgtactcttttgggattgtttctttcttttttactcaacataattccgtggggattcattcaagttgttaagggcattgatagtccaccttattgcagcatagcattccacggtatgtgggtaccatggtttgtttaacccttcacccattgaaggacatctaggttaattctagttttgggttgtatcaaacacagttaaagcattcgtgtggatgtttttgttaacatacatattcgtttctctggaataaatgctcaagagtgcaatagcgtatggcagttgcatgtgtgtgttttaagaaactcatttccagagtggctgttccattttagaatcccaccagtgatgtatgagtgctccagattgtgcacatcctttgtagcatttaaaataaaggctacatttattttactatttaaaataacattttagccattctgatagataatatatcactgtggttttattttgcatttctttaatgactaatggtgttcagcatattttcatgtgcttatttaccattcatatgtccaattcggtgatgtctccccatgtcttctgcccattttctaatttgattgcttatttgtagcttgctgtttttattctttttacagggttttgctgagattgattaggtccaatttatcaatctttcctcttatgtattgtgttttccatgtcaagtctatgaagtcttgcctaaccctaaatcctgagtattttttctaaaagattttttttattttatattgttaaatttaagtatgtgtttcaggccaggcatggtggctcatgcctgtaatccccacacgtcaggatgctgaggtgggtgaattgcttgagcccaggacttcgagaccagcctgggcaccttgtctttacgaaaaattggctgggcatggtgctgtgtgtctgtagttccacctatgggggaggctgaggtgggagaatcagttgagctctggagtttgagaccagcctgggcaccttttctttacaaaacattggctgggcatggtgctgtgtgtctgtagttccacctatgggggaggctgaggtgggagaatcagttgagctctggagtttgagaccagcctgggcaacttggtgaaacctcgtctctactaaaaatacaaaaacaattagccaggcatagtggagtgcacctgtagtcccaactgctcaggagctgaggaaggaagatcacctgacctcaggaagttgaggctgctgtgagcagagatcatgccactgcactccagcctgggcaacagagtgagaccctgtcttaaaaaaaaaaaaaaaaaaaaagcctatgtttcactttgagttaatatttttttaaggtgtgagatttggttttgagcagtggatgtccaaatagcccttagttgaaaaggctatatccttccttcactgaattgctttggcacatttgtcaaaaattagtagaagatatttatgttgatttatttcagaattctatgtatatccttccaccaattccacatgttcttgagtactgtgagctataatatctagtagagcgactccttctactttatcctgctatttcaattacaaaaaataataaaccttttagggcctatgattttccatataaatttcacaataagcttgttgatgttttcaaaatatcttgtttagattttgataggaattgcattatatctatagatggatttggagtgatttgaaatcttttactatattgagtcctctaatatataaacatggtgtaagtatcaccatttaggtcctcttttattggcattttgtaatttttagcacatacattgtattagtctgttctcaccctgctataaagatactaccagagactgggtaatttataaagaaaagaggtttaattgacttggtttcacatggctggggaggcctcaggaaacttacaatcatggtggaaggtgaagggaaagcaaggaccttcctcacgtggcgtcaggagagagaagagtgaggtgtgaaggggaaagatccccttattaagccatcagatctcgtgagaactcactcactatcatgagaacagcatgtgggaaactgcccccatgatctaatcacctcccgccaggtgcctccctagacacgtggggattatggggattatacagttcaagatgatatttgggtggagacacagccaaactatatcatacatcctgcacctgttttgttgagcttacccataaagtgtttcattttctttttggtgattgtaattggttttgtgttttaaattttggcttctgcatgattattgttggtatatagcaatgttatgaattttctagggtgatcttgtatttcaaaactttgctgaactcacatttatagtagttctggaaattctttatttgttggaattttctacatagacaatcatgacatctgaatttggagcagtttttttaatctttccaatatgtagtttttatttctttttccttactgcagtgactagaatttttagtagtatgttgaataagaaaggtaagagcagagattcttgctcttcttgttcctaatcttaggaagaaaaagagttcaactttcaccattaagtatgatgttagctgtagattgtttgggtaagtgttctttatcaaattaatgaagttcctctctattcctaatttcttggagttttgagtattaaatattgtcacaaggcattttctgattcaattgatatgattatatgatttttcttctttagtctattaatgtggttgattacactgattgattttcaattgttgaaccaaccttacatacctgaaataaatcctacttggtcatagtatacaattatagtatatgtagtatacaattccttttatatagtgctgaattgatttgctcttctttctctagtttcttgaggtagaaacttaatgttttaagatccttcctcttttctcatataagtattagatttagcttagtgttgtaatttaatgtgtaatttaatttagtatttaatttagtttagtgcaataaatttccccttccacgctgctttagcagcatctgacatattttattatgttgtatgtttgactcttggacaaaatgagggcttggggtattgactcccgatggagttaaaaatttgcatttaacttttgaccaccccaaaatgtaactactaatagcctactgttgaatggaagccttaccaataagataaatggtccattaacacatattttgcatgttatatgttttacgtgctgtattcttataattaaatagagaaagaaaacattgttaagataattataaggaagataaatatatatttactattcattaagtgggagtggatcattatataagtcttcatgctcattattttcacattgagtaggctgaggaggaggagaaagaagggttggccttgttgtctcaggtggcaaaggcagaagaaaatttgtatataagtgaatctgtgtagttcaaacctgtgttgttcaaaggtcagctatattttcatgtgcattcagttctatgtttttgaaatttcctttgaggttttcaaaattttcttttacaactttctttttgactcatgggttatatagagatgtattgtttagtttcaaataaattggagattttaaatattataattctgttattgatttcaaatttgaatcattttcaatcagagaacacattcagtgtgaattcagttctttaacatttgttcaggattttttaacaggccagaatgtagtctatcttggtgaaagtttcacaagtatttgaaattaatgtgtatagtttgttttgtgtttacacacgcacacaaacacagatgcatacacatataaatcttctgttatctttttatttctatttaaagaacttcttttagtcattatttaagagtaggtgtgaagaaaaccaattctcttataaatagaactaagtacatctactttgtatacttttcttgagtgattctatattgtaatgatgtcctttttactagttctatcaattgctgagagtttgctgttgacgtccctgatttaattgtgggcttatctatttctcctttcagctgtatcagtcttgcttcatgcatgttaaagttctgttgttaggtgcatacatgtttaggatcattaggtctttctagtggagatatcattttatcattatgtaatgtccctcttaacctctagatatttggtttgttctgaaatctatgctatttgatagttactagttattccttttttcttttgattaatgtttgcagatatatttttctgattactaatttcaactgacctgtgttgatgtccatgaagtgaatgttgtacagatagcatattttttggatacttttttaaaaattaagtttatattctaatacactctgctaatctctgtcatttatttgtatatttagaccatttacatctgagattcttactgatatgctagccttatgtgtgcaattttattttttctatttcttgtctgttgtgggtctctgcatttctcttttctgaccttgctgtaggttacgtgaacacattttaggattctatcttggtgttttaacagcattttgggtatatcttttttgtatagtgtttttagtggctctaggtattaaagtatatgtaagtcacttatctactgacatggacatattactacttccattaaagtgtacttttatttccacttaggtcctttactcattctaccttttcagtataattgtcttaagtgtttcccctacatacagtgagcatcacattacactgagttgtaatttttgcttcaaccgtgaaatattatctagcaaactaataagagggaaagtctaacttatttccccctaattttattcattctgatattcttattttctttataagttctgaagcttttattatcattttgtttctatttaaagaacttcctttagtcatcctttaagaatgggtttgatgaaaacaaatactcttatttttcactcatctgagagtgtcttgatttttccttcattccgaaaggatatttttgctggatataaaatttatgattgacagttaattgctttcattacttgataaatgttgtgccactccttctggcttctaatttttcagatgagaaatctgttgtcatttgaactggtatttacttataagttttacatcattcctctggctgctttcaaggttttctctttgcttgttttgtatttagcagtttaatagtgaaagccctagcatgagtttccttggttttatcctattgtatgagatttgctcagcttcttgcatgtgtttgttaatgtcttttgccatattttcagtattttcagacattctttcttgaatacattttcactgccattctctcctcttattctaggattccagttatacaaatgttaactcttttgtttttaactcactggttcttgaagctctcttcaagtttttttttttccttttaatctctcttttcttatttgttcaaattaggtaaattcttttgatttccttcaggttcaggaatcctgtcatcttcctgttacccttgaacccatatagcaagtttgagtttgtttcaatggttgtatgtttcagttatttagtttccgtttggatcttttatatatatatatatatatataacttctatttctatgctggggtttctctcattttttttcttgcttgaaagaattcacaattgcttgttgatgcatttttattgtatctggtttaaaatccttgcctgataattccaacatatgattcatatcactgatggcatctgttgatcttcttctttcattcaagttgttattttgatggttcttagtatgacaagtgatttttattatatcctggatgttttgggtatcgtagtatgagactctggatccaaattcatcttctttttttattcagaagctgtccttacattgaggtgtgcacagaggccaggtgggtgtgtatgttcattcatcaccccgttgtcactgccaacatcatccagcagaagtggagcactgactcacactgcagcagatgggtagggtgaaacttcagcttccctgttgaccccttcccagtgaaagcgggccgcctattgctgctgccttgttgcccctcatggtgacatattcctaactccccactgagccacggaagggaaaaattcattgcttgttcacactactttgttgctgcagggtaggggtggaagctgagcttcctgctggtctctgtgacaccaggggaggtggggaatggagtgtcaagtaaccctcctcctatcaccttattctgcctcattgatgccaggtgtgagagaaggttctgcttctctccagaactctcccagttcttgtgaactgggtccaattcacaagaaagggaaaaaggatgtagagtattgattggccctaacacctagcacacagtctcactaataccactgggagtaggggctcagctcccctctaggccctgctcacttagtgagggtggggtgggaacagaatggagactaaccctgacacacaccacctcatgtggtcttgtgctgtgaagagagtggagaggttcattccctccttggtcccactgacaccagaggttggagtaaagtaaagtgctgatgagccctgactctcgtgtccttgtttagtcttgttaatattgggtggatgttgagcttcagctcctgactggggccctgccagagccggggggaatgtaatgtgctgactagtcctgccttgcaccacttcactaagtcttgctgctaccaggtaggggtggtggagatggtttagctacttgctgggctgaggtgacactaacttagtaaagagttggagcatggctgactcctttcagacaggggatgaaagatcagccctctgctcactctgccaatactatttagaaaagagaatcagagtggcacaacttccactgagcagaggacagaaaataagctccttatttggtctcatcaaaaccacccctacctacagttagacagctgcctgtttcaacaagtggagaatggaagatcagctctctgtttggtttattggaaccaccaggcaaggggaattggaacactgactgcttctgccagtgggaatagaaggttagctgcctcttggccctgtcaacaccactgtgaaagggaatcaaaaactactgcttacttctgttgggtgagagggtggggtgaaagattagctccctgatgagctcggctgctggaactatgaatgtgtgtgagtgtgtgtggggagagagtgtgtgtgtgtgtatgggtgtgcttgtgtgtgtgtgtttggtttttccattggagtttggctaaagtatgacaggtactttttgctaaaaaggttttctcttgtaggccaacattttcctgatcttctgtctaggaaaataagcctttccttggagcttattttgtctgtgcctgttggtggttctacgttagatgtttctggatattaaaacaacaacgaaaactagggaatttgccatgttgttcctcaagtcctcagattcctaattttttttcttctacctacttcgcaaagtcatcttacacttatttgttttgttatgttcagggctttttaattatagaaagagaactgggaggaataaggctgctccatctctgtcaggatcagaagtcatgtagtgttataaaaaggactttgtctaccattttaaaatagctgttggctgtaagctccttattgtatttaaagtatattggctaaaattgtgggaggtaaggaaaactctttgtaaagtgaactgacatggtgaaaagagagagaagatatgcttgtcaaatattgcgaagtctattcagatcaagctagacatggtctgtattagtcagggttctccagaagaaaagaaccaataggaggtgcatgtctgtgtgtgtatgaaaaggaatgtattagggagaatttgctcacatcattataaaggcaatgtcccacgacaggctgtcagcaagctatagaatgatagaagccactagtatgtctcccaaggaaggtgatactatgtctcagtccaagtcccaaagcttcaaaaccagggaagctgacagtgcatcccatagtctaaggctgaaagcctgagaacccccagatcccccagagaccactgctgcaagtttcagggtccaaaggctaaagaacctagagtctgatgtctaaaggcaggaggaagaaagggcattctgcactggaagagaaagagagaggcagctcacaaagcaagaaaagcctgcaagctgaatatcccccttcttctgtctgctttactgtagacacacctgcagctgattggatggtacccacctacattgagggtaggtctttctctcagtccactggcttatatgtcaatctcctctggaaacaccgcaatagatacatcaagaaacagtgctttaccagccatctaggtatccctcaatccagtcaaattaatattaaccatcacatggcctattcacaatttaaaaatgtagcataaattgcagcagtggtcaagtgtattggcaagttgtaaagtgcctataagaaacctatacacgagcatttgcagattcccttaacacttttcagcaaatattttgttacaattgaaattaaaaggcagtttgaaattgttcctctactaaatatcacactggatatgaataaaataactagatagactaacaaggtacatactttattgcctgtgattattgcaactaccactcctggtggagagccattcttctcaggtgtgcaagtggaagattaattctcaatcaggaatatagatttgatacaaggaaagcatttcacttggcattagtgtgtcaacatttcagctaatttgcctaaccacaaatacttcagggggaagagaaattgctagtgctttatattaaacattggatggagctggcggagataatacaatttgtactttttttacatagtttcaacgaattttggcagatatgtctttttgaggcaactttagatgttgaaaagctgcttgtggatattcaagacttgtctttttttcatgttacaatgaccatcaccatagtttgtatctgattttttttgtgtgaattgaggaatgtggagtcataatgcaaaagtcattgccataattctttgcagatcttatgactggaaattcttgtgtatgtagtttgatattcatttgtaacacatgtaactggttcgtgtaatgattaaaataataagtaatgcttgatcatggttaaaataaataccaaggataaattcttctattaattagtgtaagcttatcctaattaacatctttaattatgggctgttgttaatttttgtcgcaacctattagatatactgtcctaaatcattaacactagtgtaactgagcataaactctaggtgactcacggctacagtggaagcgcccatggaaaatatatatttctaagtacacagtttagataatttcaagcagaatcagaaaattcttgatgaattctaaatttagtataaacagaaatgtattaggtttggttattgagccaagcttcaaacattgaatatcagaattgtgtccatttgcaatgagtaagcatttgattcaagatttttttttgtactcagactcatttttgtatatctttctgtttaagtcatattgtatttactgcgattacagattttttacatatttcttaaactggttctatgttatgccattatataacaggtgataaggaatgtactgtcactgccccttgacaatgaaaaggggacatctctactagtgtatgtgtatgtagctgtggaggagttgaaacagtgtaagtgaaatgcctagaaattgtcctgagttttgattttgtttgtgcttacatttttattagtatatgtactttcttgaatagataattgatttggggcaatatttctcaatcttggcactactgacattttggactggataattattggttgtgcctggctttcctgtgcattgtaggatgttcagaagaatctctggtctctacccactagatgccagtagcaaacctgccacctctctgcctacttccgtcctgtcttgcaatagtcaaaaatgtctgcagacattgccaagtgtcccctaaggggcatgagccttggtggagagaaacttctttacagtctcatccttggcgatgtcatttccttataatttgcgtagttaaacatttttgttttgaggagcataagttgtgataccatacctgtacagaagaggcttggatttaaggttaaccacatttaactgagagaattttatcaaagcatgaaataagaaaaataggggcaaaaaatgaaattctaaaatggcttatgcaatttctaagggtagctaataagaattctgaattggtgacattgtttttaaaaaaagtaaagcattaaaagaatttcaaagataaaatatattttttggagtgtgaacactgtaattaaggagacccaataatgttaagttacttaaaggatgtatttttacttaaagtaggatacaagttggagaaattaacattcggttgattgttaaatattttgattcaaagaaagaacatagaattgtcagcctcaaaaaatatgcttaagatagaaaaataattttggttgcatgaaaagaaaaagattttagtaaattgttgacttgaaaaggggaactatttgacagaagtctcaacagtgttttggagtggcatagtgattggggggtgacatcagatgattagagttaaaaacgactggaccggctgggcgcggtggctcacgcctgtaatcccagcactttgggaggccgaggcggctggatcacaaggtcaggagagcgagaccatcctggctaacacggtgaaaacccgtctctactaaaaatacaaaaaattagccgggcgtggtggcgggcgcctgtagtcccagctacttgggaggctgaggcaggagaatggcgtgaacccgggaggcggagcttgcagtgagcggagatcgcgccactgcactccagcctgggcgacagagcgagactctgtctcaaaaaaaaaaaaaaaagactggaccagttattaggccttaagttgatgtaaactatatgacaaattgacaatttagagacattgtggggacatttctatgaaacgtctgtttattattcattcctgtgatgattttgaaagggcaaataaaatcataatcacatattgtataatgctttttgtctttcaaatacatatacattaaaaatgacttatataaagcaaaatgtacctttttgtgcacaattctattggtttttgtggatgtatactgttgcataaccaccatccaaccaatacacagaagagttctataacttcagaatattcctttgtgctactcttttatagtcattcccatcttcccatccccaccctctattgacccgtaaactgttttctgaataaatatctgggaaaaggattgctgtgccacatggtaggtgtatgtttaaagtttctcagaagttgacagactttttccacggtggctgtaccattttgccttctcaccagcaaaatgtcagattacagttgttttgcatcctggccagcacttggtatggccacttcatttatttatttagctcttcttctgataggtgtttagtggtatctcattatggttttaatttacacttctctaatgattgatgattttccccggtgactgatgatgattgaggatcttttcaggtgcttatttgcctcccatgtgtgtatcctctttagtgaaatgtttgttcaaatcttcccatttcaaaaaatgttggcccttttcttattatgaaatttctatggctctttatgtcttgtgcatagaagtcctctgtcaaacagatgtctgttttgcaaatattttcctgatttgtagcttgtcttctcaatattttaacagtgtcatttatagatcagaagtttccaattcttcaggtctggctcccctccataatctgtttgctttgattcacttttcagcatcctcatgtagttgctttttgtgtttggtctgagattttacttgtgattggcagggagagataggctgaacgtgactgagtggagtatagcatgagaagacttgcataatattttttttaattttcagtgttttgcaaacattatttttgatccattaataatgttaatgattgccattttatatacgagaaaataaaaaaatcaagagtcataagagtttaagttcataaataataaaaagccacatggaaataaccagtgatctaaatcacctggaacaactaaaaccttaaggtattatatcctagtttgtgtgttccgaccacaagcccctagaatgcaaattacttatgtaccttatttaattatgtttgctttacgtaattttagtactttaggaacttccttgattaaatttcaattcatacatttgctgaaaaataactaattttaaaactaagtaaggttattaagtaacttttttccatctggaggagaattgtttttgttccagattctttactgacacaatagtagcacactcgaataagtgcatagtatgcttcatggaagatcatgtgtaaaagccaggcttagtcaatgtttcttctgataatacatgtgaaaagttgaaaagaacctttatggtcattttcctagtaagcaagtcaattccttttgcttaaagcattttaacttcattaatgtaaaagacaatagatatctactatgtatacaacactttttaagagatcttgaggttacagaagatagtaaagccatggtgtctatccttaagaagctatacataataagaaagaaagaaatctcactgtgatattgagtatacatttttggaaagtaatttttgaataaaatcagatgttttaaaaaatcgtaaaaggttttgaatcaacattttcaaatatttagaaaataaatgagaaaaaagacagacccaaccaattccttccagtaattttgctctgatattaatgtaattcccttcagcttttatgtgcatattatatatgttattaaccatagtacatctttaaaacatatataattttgtctgctcacttttttttaaaaaaacagcattgtatcacagtttattttcatgtaccttcatagttcaaggtacaagggaagtaacagagattccctgagagaagacaatggatgttcctaagaaagacctagtgtgagagttcagggaactgctacactttggattttttttttttttttttttttttttgagacggagtcttgctctgtcatccaggctggagtgcagtggcacgatctcagctcactgcaagctctgcctcttggggtcatgccattctcctgcctcagcctcccgggactacaggcgcctgccaccatgcccggctaatttgttttgtatttttagtagagacagggtttcaccgtgttagtcaggatggtcgggatttcctgaccttgtgatccacctgcctcagcttcccaaagtgctgggattacaggtgtgagccaccacacctggccaggattggttttttaaaataatgtagaatgttttgtatttgtccttgcatcatgtaaagatttatccttaaaagtgcaatttgtctttggactataaactctgcgagggacaggacagtacttacatagcatgttaaaaattcaagtatcaatctacccatttaggtctattggctctttactgagtccagggttttatttacatgtatcactgaatgaatggccttaagaaggtacagatgagactactgaggcatagagagatttaacagaggcaagcagagcatcacaagcagtttggaactcaacacatgtttcttgtttgaaaatatgcacagacaaaagagggatggatagaaagttggttcaatataggattaagacctggaacaaaagcacatgggcaccagcagaatctacttgagaggtcacagcgcccaaggggaaacaaccctaggcaagtcacttaacctcactcaccttagttctcttgttggtaaaatgcagagtttatgcaaactcaatacatgtcaagaaatatctgcaaggcattgtttaaaattgaccctctggatttttttcatgcatgcctggttattatttattaagatgtactaggggcaagtctcaaatggaagaaaaaataaaaggcacatctgcaaagtgaagaagtggggttaagcgcaatgcaacagaaactcttatactaatccaggaggactttacctgtcaatcaaatctatattcattttttttaaagattaataatggtttgttaactgagtaagctggcagatggtaaagtaatgtgatgagatcttggggcatctatgaccagttgatgactgactgaccaatttcaaaagatgctatgaaggatcataaagtttagttccatgtggattttgatgatagttgcatctatatttaaagccttctgtcactggaagcactcttggtgttgtcagactgtctattggactggatgagctgcaacttctcgcaattgaatgtcaataagaccaaagcaattttggttgattcatagcaccagcttaagcatattcacttgcacagattacatttgacagatagttaccttcagctgaactctgtggttagaggcttgggcgtattcttgacagtgagcttagagttgatgtctaatgtttatttcatatcctgtttttaccttccctaatattgcatgtgtaaatctatatttaaatatattcacagctgatgttcttgtcggtccacttgttatctctggacagaatgctgtaatgattcaatttaattattttaataaaaataacttgcacccctccagttttaatttcaataaatctgacgagtaatgattaattttaaggagtcttattgatgagcaattgcaacactataatgcaggaaaatgcccaagtggtgggagcatgcttacatctatagtaaacttaaaaccttcaaaatttggtgtgtgattatgaacaccgaggaaatatatccacatttatttaccaaattattattcctgtatcttttttaagttatttaggtccatcagttatcttcaaagtttaggtttgaaactatccatttcaagaatattagccttttaagatgattataatttaaataacatattctaaaatgttttaattgaacagtagaatgcatgtaacccaaaacattataaaatttaaaaagtcacggccatttttgaatatttagattgggaaaacacttaagatgtggttttatgttcaagaagaggtgcaattatggtatggattcattcatcattatggtattgtattgtcaacttttcagttatgttcaatttttaagatgctgggtgggaaatttaagggacatatagatctaataatctgagcctaaatctcctgctctatacaaataactctgcaaagctttggaatccctttatttgactaggtgaatggcagttttgtttgcatcagcctaaacctagcttggaaatcatgattttaaagcaaacacgttttcctcacacatttccatatttcctagaatctatggttttaagatatcaaacaattcaaattatgtagttatacatttcacacaggacaaaaactcatgctgaagtaggtaaaatatttttcaaaattattttctctacatttactggcatactttctctttcttactgtcttttaaaactgacagtcagttttttttatttttctcttttactgacagctagtaaatgtactgacagttcagaagcaagatgtaaatgtaagtcactattattttgttcacctgatacctgagcattagtagaaatgcatggctatattttaaaataaaaactagattatttccaatggttctgaagggaagatgtatagaaaaactgtcctctgtaaataaaaatgtgtttgaggcaagattgcattacatttagaaatagcatactttcctcattaggatgtgattggtatttgtactgaagaaaatgggctaattatttaagtaagatgtatatttactttctgtttcattagctgtaaatctttatagcatataaatctcctttagaaattaatgggaagtatataagtgagggaaagaaagcaggttatgaagttaataaataccatgttaaaaattagtttctacttaaatataaagttcaagattaaaaattaaaaattgttttattttaattagaaaaatcttgcttagttaatttctctggaagaaatgctatataagcagttaaatgtggagaattatattctattgataaaagtatgttgggccagactgaaccaacaacatcatagaaggactgattccttacttcctttaaaaagtgatctgtcatttgtctacattataaataacagctgagttttaaaacacaaggagatttttaaaaagtggcagcatttatttatttactgcttagacagtattcacagtattttatttcatccttaagactctttttttgttttgctcccacattattgttacacatatgggaattggtaaagtgggaaaacttagcatttatagatttttatactgaagcatgcgatgataaagtagtcactttcatccaagaaccttttcctcttttcacttacactagctcttccagaaatggcccctttagtgcctttaatggttttattctccttctgtcactatttttaatattcttattcttatactgccatcatatataactttgtgaaaatttgtcatataaggttaaaattgatttgcctttaaatacagtagtttccattttctgttaactgtttgaagaacacctattgagaggcaaggaaagacctgcgggataagttacaaaaggcaagaattcctcacagaaaaagcagcaggagcttccttgtcaagagcttcagcaagtagtgtcagcagcttagaagttgctattggactgctgagtgttatgcagataaattgtggctctagcttgtcctccgatgtcattctttgatttttctctgttaacactgcatttgcatttgggtctcactgagaacaaggaccagtgcaaatgccttatggcatgtgtagaaagctgcttttatgttaaaagtgatatgttttcttgttcactgtgttcacaacaaaaattcatcttccgagtcttggaattcccttatgtatttgtaattttccttccaagtcataatattcatatacaaagagtggaaatttttctttaaaaaaacctaccaaacaacaaaaacagtaaagttagttggttactagcagcaacaactgaaaagcagcatcaccaaaacatatgcaattcatgggtttccagcaaaagaggaaatctggaaagagaagatccttaagtattgctttaaagtgagcactgaaggacagccgttaaaacaatcccaatttttagaaaaggtattattccctgacatttacttgttttattcccttctcaatctgaagacacattttggacagatgctcttgtcttacatgaacattcaattcatttgagaaaataatggttatacttaaactcgtgaagtgaaatgtatggaagtctgttgctttataactttaaatagccatgtaacttgttcatggcagaatatagtcaagtcctgggcaaggactttttttctcttctccaataatgctattcaaggggaagctagttattgtgtgacacatgcttgattctcaggaggtttggacaaaagagagggttagaaggtcaggagagcctgacgctattcaactagatatttgagtagaattcccacaccagaattttgcctcatacctaattcagacagtgtaataatgggggaagggcagagagagggagggcagatggaggtgtcctttcaggttaaatgttaaaataagggtcttcatttctgtctctggtggcacagagcattaaaaaccctgtgacacattttggaagtgttgctataaaatagattttaacgtttgaggatctataaagggtattattgagtacttaatagattctgtgtttgcctactgaaatcactacaccgccgatatatacctcattaatttgtaaagcagtttggcccaacttgagacaatgtactgtattaaagcaaagtctatatcccaaattttcatggctaataattacaaaacgttcagcatctgaagaaaattatctaaatgtgacaatattggtcttggatagtttaacttgcgtgaaatatttcacacagaaacatttgatctatattgaagagttgtttcttttttcatcagatcagctatatcacagtaaattgtggaaatagaaaatggaaactaaattgttgaaaatgcatctgatagtttgtttttattgccaaaatgtcattgtccttgaggtccatcactttgtagcttagtaaaaacagatttaggcattgcaagtgagaagtcattgactgttttccttgtaaccaatttatttatcaagttggtaagtttcagaagtatttccagtgttcagcctatttcttcacttttctattttccaaattatatcctattacttcaaagatgtataaagttcacacattctggattctttatctcttttattgttttctgcttcatacaaagtaattaaattatgttcttgaagtaattcctcctatcttacttaaaatcaccttcatgatctgtcaagagttttcaagttgttctgtgataaagttcttagagtttgagaagctaaatggtggagttggtgcttaagctcttcactgaaagctgcaagagtataaacgaagtcagaaattactattattattatttttttctcattgagacggagtctcactctgtcgcccaggctggattgcagtggcgtgatctcagctcacggcaagctccgcctcccgggttcgctccattatcctgcctcagcctcccgagtggctgggactacaggtgcccgtcaccacgccaggctaattttttgtatttttagtagagacggggtttcactgtgttagccaggatggtctcgatctcctgaccttgtgatctgcctacctcagcctcccaaagtcccaaagtgctgagattacaggcatgagacaccacacccagcatatatatatatatatatatatatagttttttggtttttgttttttgtttgtttgtttgtttgtttgtttgtttgtttttttgagacgagtctcgctctgtcgcccaggctggagtgcagtggcaggatctcggctcactgcaagctctgcctcccgggttcatgcctcagcctcccgagtagcttggactacaggcgcccgccaccacgaccagcaaattttttgtatttttagtagagatggggtttcaccgtgttagccaggatggtctcaatctcctgaccttgtgatccgcctgccttagcctcccaaagtgctgggattacaggcatgagccactgcacccggcctgaaatgactattctttttaataacttctatttattgttttgtgttattcataattgttgtgcaatttaatttatttcactagtagaacactatgtacaggactgtactgtgtggaggttttagaagtgacaaaaccagttaactaggctcttggtccaaaggaatttagtgaaagagataagacataaacactaatgactgtaacatttatggaataataaataggagctgctgaaagttgtgatttcttctcattatgatagtgcttcttggattataaaaaatttaacctagaacatgaggtttcaagaggcagagatggggagagaagaattccaggtttgggactaggatgtagaaaggcagaaaggtgaaaatattcttgtgatgatggcaaacagtgactggtcaagtttgccaagagtaggttttatgcaagagcgtagtaagatgaaaccctgaaggaattttactgtcagatgatagaaaccggaataaagctgaggatacagttcaataatcaaagggaaccaaatgaaagttttgagcaaagaagggatcttattaaaacagccttttattatttcttttaagctagaggtagcttggcattatctgtgccagctcagagtgaccttcaccccaaaattctagttggattatggagcagttaatcttacaggctctaataattctgtcaccctttgttgtcattctatatctgtgtcccttcagttatgtgtcttctcccatattctcataccattatttctctgtctttcatttctttactttcatcatccacatcaggacaatgtttttattctatagtagtttgtaaacatgtcacattctttagactttcaagctctttgtcaacagtttttcaaagtccttgccttacataaacactaattctttccctttagggacccctttcctggcccttccaagcaaagggtgctcattcatccactcctcatgcacctcattgctgggagcaagtagagatgtagggattgctttcttctttttcttttacctcatattggaaagagatgtttcctttaaagctcatgttaagttgttgtgtacctttcttcaatttttgcatcaatttttgcaaaccttgcatcaatttttgcagctgctgacaccttggataccccagccacctgcctgccagatacaatgaaaaatttcacctctgactcacagtgtttctctgcatcattatcagcttttggttaatgaccatgaagcttcactttttcacctcttgaaaacttttggctacagaatgaagttaagcgcctaggtgcttatattgtctttgagtctgttgggttccttctaggttcagtttcttcacttctagcctagcccacaaggaaaatatctttagtagtcttttaaccattttcttttatttcattttttttcattctgttgccaccagacacctattctcaaatcattcacctgactgccttcttaattcctgtgtatagattgcagaatattactgaaaaaaaacaggtgtgtggattgaggccactaaaaattaatgatttccaactagagatggacccttagtgcagccttagggtaaatttcagaggtgcagctgattcaaagggtgtgcacaatttcaggggtatattgacctactgtcttcagaaaatgtttgactagtgcagactcctaccgaaagagaatcagagtgcctattcctcaaattattgttaatataaggaattatcttttctcatttttttctaattttatgggcaaaatagtatgagtgtattcttatttcatttagcatttcttcccctacctcgtacttatcttaccttacataggcttattagccagccacatgtattttttgcttctgggtaatagctgtgtattgttctcttatttttttaaataaaggggtctgcatttttattaatgactaagaaatcttgatatatttagaaattatatgtaaaaataattttaaattttttttattctactttaagttctggggtacacatgcagaacttgcaggtttatgtcatagttataaaaaaagaaagaaagcataggcagagaaggaaaatcactctggacagaaaaaaataattggttaaaatattaaagaataaaatttgtaggtaaaaataataaattttaaaatgacagtttaaaaatttatatgtaggctgggtgtggtgccccatgccgatagtcccagcactttgggaggcctacgcaggaggatcacttgagtccaggatttcaaggccaggttgggcaacatagcaagacgtcatctctacaaaaaaaaaaaaaaagaaagaaagaaagaaagaaaaaaaattagccaggcatggtggtgcatgcctgtagtcccagctactcagaaggctaagatgggaagatcttctgagcctgggaggtcaaggctgtgagccatggtcgtgccactgcactccagcctaggcaacagagccagatcctctcgcaaaacaaacaaacaaacaaattacatgtgaaaagaattatacgtgaagataataatttcagacatacaatcctatgttaactcccatagaaaattaagggagttatcacacctttgcttttaacaattctttctcttcccacattccagttttgttgaaataagcagagcttcttatcccagcttattgtagcaaaatcattatagtaaaatgatatttttatttcaagcattacaatagcactttataacttatttaaaaatttatatgatgttaaaaggattcaatactcattgagtatcctttcataacatacatctctaatttcttaatttgaattgagctttctatttggtgagagtatttctattctgaaaaggaacatggccagtgatgtaccttctgaatctttgcgtagttgagcctgtctttctaatgcctgtacccatgaacaatgtctggatgatgatggatttttttttcttataccctttcgtttgtgagcttttaatacattgcatcgtgtttctgaagagaaatctgagacaagcttaaggattatttttcactgtgggtgacccgtttttgtgtgcctgagtgagattcttacaggtttctttctttatccttaaaatcccaggactaccagcctatagtttggtgttaattaatctttgttttcttgagaatatggtaagcttttcttagctgaatattcaggtcatatttttaatcccttaattttggtttctatcatgtctttgagtttatattttcattatttgttttcttcgggctttcatcctgtgaaatttagtgaccaatatagttttattccttttatgtccaagatacataagaagttgtatgtactctagtgtccattcgttcatcaacttattccaattaccccaaacccctatttccaagggcttttcttcttccgttcagactctttatttgggtcttttcgtggttccttgcttaacactatgcacttttcacggcacacactttccctgggaattcttactcacaaccatgactcctagtactattttcatatgcatagttataaaacctgtaatttctaaatttatattgccacagtgctatcagtgagctttcaaaattcaaattcaagtatgatttttcttagttttaagatttcttcagttggaatggagacccttaatgacttagctctgacaactgttcagcctcatgttctgtaaggtctcctctgggacctcacattctagtaacactgagctgtctagtctttaattgtatccatctttcttatgttgctacaactgcacatgttctttaccaagaatactctcccttactatttattccgcttaatcctactttttcctttcactcatttggcatcaacattttcaggaagccttttcttatctcaaaatctgagtagacatgcactcatcctttctatgaaattatcgcaatttactcaatgtgctttatttgtgtccatcactagactccagaacttttagatcaagaattttaccttatttagtgttgttcccttcagggctcggcatcatgtttgaatgtgatccattctcaataaacaaagtttgattgaatgagtgatggcatcatccagtattagaacaaagttgataggacagtttgtttagaagctcttgcaagaatacagttgacccatgaactacaaggaattgaattgcccaggtctgcttttatgtgaattttttcgagctaaacacagattgaaaatacagtacttgcaggatgtaaaatccgactatgcacagggccgactttttgtatccctgggctccgcaaggctaactgcgagacttgggtatgattagattttggttatttatgcctggatcctggaaccaatcccttgaagactgtacagatgagagatattagttgatcgaatatgtagcaggagaaaactgaaaaaggaaaagaaatttatgaagtaaattaatgagaccgctgcatttcattactactttggagattagaggaacaataaaggtgactttaaaattttgaaccaacttctttataacatggcttacaagtggtagctagaaagaggagggttggttacttttgctttgtatattgcaatacatttctgattgttccctttccacttttccccctagtattgttgattactttgtctttgtaaaaaacttcatcgtgaaaatttctttctaaaatgtaaatgtgattacctccttcctctccttaaataaacactatgctcacgattgctcacactccagagaatgaaatttccttcccttagcaacatgttcaagatccttcaaaatttgttagatggtgcctctatagcttcattgtccttctatgtactttgagttttaaccatgatatttttttgcctcccaaaatcatgtactttgtggttttcatgcaagctcttcctgtttgccttattcagttgcttctagcttgtacacttttccctctccctcttcaactccatttctttgtgtacgtatctcaatgaccaccacaaatacaacttcctctgtaaaacacactaatttcttctctccttttctcctctctgctcctatagcacttttttttcttattggctgtatgacatttattacataggcatattttattagatattaagtaggttttgcattaggtatatttttgaatgtactgaaaggcagatactttattcattcatatgtgctcagaagagcaaaatatctcttacataatgtatgtttaatataagtaaatatacaaacaaatagaaatattgagtttggtaaaagatgatattgagaaaaagtgatatgtgatagaatgaaaagctacatatattttctaaatgatgggtggacatttacaactttgctaaattatatattaaatcatctctttatcctgaaaaaattatcttttccatgattagtaagtactttacagtctcttctaggttataaagctcagtactctaattagttttagaaaaactgtgactaaactagcagtactgttttttctcccatattttgtctcacactgaagtcagtgatatttttttctgttcacagatatattcactcttagccttccctgagctctattacagcctggaaaataactggaatttcctttaaaataatacacattttcttaacttatcatattaaatgaaaaacacacaaacactggcctcctttcacattccctagaactttttgttttttctgtatttggcatttctgatgtctttaattttttgtgattctggctctgtattctggtgcctggaacagtgttgcttccaaataaataggcagtagtgatagcaatactcataaatattttaagctatttggaaaaagatattttttagaagctgtgttttgaatgaccttcccatttaactacagtgaatttcattcttagttccttcccaatatctaccctcttgcatcttcttttatgttgtttctaacgtcttttgcggtacctatcaatttactgtcatctactgttttcattaagattgctacttgtagatcattaataaaaaggtgaaataaaactaaattccttatcaattctctccttaagtcaataagtatccagttttaaatgacagtgcttgaattcaagttcatattaaatgttacttcaaataagtttgggagtttacacatacatggctctttggttcaattacatttgtcttatttattttgttttctgttcccttgtagtattctttgataaacttgtcctttaaaatatatattccaactaaactctgcttagggcctaagtggtgtagccctctggggagggtcgcaaatgtaatttgtttgattggatactcaagcttttcaattgttttcttttccttagagaaatagaacctttctagctttcaggtcaattgatgtaatggttggattcagatggaatgacactttctccccattgtaagtctctagttcctcagagaaatccttgggaaatctgttgacaacttgctgtcatccagctgttctgatggtataaatgacttagacactgattcctggtagtttaaaagtctaatggaacagtgaaattttgagatctcaagtgcatcatgaataaagcacttaagtagcacttgtatatacttcttacaatttgttaactggttttctgctttttttttttgctggagaaagagatttacagttttaatctgattagacattagcagctggttgaagatgctattactgtgaagtatggaaaagaacacaatcatgatgaaaactttttactcaaatccttagaagaagaaagcagatgaaattagattggcaaaggaaaccagcccaaattacacacaggagagaaatgtagcagaggagagtactgagttggtgctgcacgcatagagcttacagcctccatgggcaggggacatgtgggtgtgactgccagggacaggaattgcaaacagcatttggagtgacagtctgggtcagcttctcatgctctttcccatcaccaggcatcagcgagtggaaagatttgacctgattttggagcacagagtgtgggctctaaggccacaggaaggcaggtgaatgggactaggatgtagtggagtccccatggctaaaaaataagttgtattgcatacctgcctttgccccacaattatcaaatccaatctagggtgaatagaaacacatctgcagacagatccaatgtccacctacaaaaagtttcagaaaatgaaaacagatggagaaaaaaaattataaaaatataaagaattctggtaaagttgccaaaagaaatgagtcttctagtcaaatgggctttgttctattagtagatgttgagacgaatgcagtgaattgattagagctgatgttatttgtttgggtgcatacatgtgtgcctggtgaggggtgggtgagggaagaaaaaaaactcaaacaaataagaaacatattgagagaaaaataatacctagagaattaaaatagtacactataacaaagtttgtgagtgattattaaggcttgtgtgggtattcgggggctctctgaggtgtcaatatgtaaactgagatctgacagtaaagactcagctaccttatatctcttcatccctacatcttgttctaagaaaacatcagaagtcctgtgatctcagcataagttgaaaactcgtaagtagtcattcaaaggtggatttgtggagggtagaggtaaactaccttgattatatttacatagaatggaagtgatgctaatttagaaatgtccattgctgtaagtcttaggagatgtaaagtaccaatgaaagatcctgaacagtattatgtgacagaaaatgagcgttacacttttaaaaaaatattagatgttgtaactttagtcattctcacctttaccttttaagtatttcaccatttaatatcaaccttcattattgatttatttctaaagatatctggaaatagtttaggctcattaattttctttttaagagtcaaatcggcatgcaaatgtttctcccaccaagaaatttttttcctggacttcaccttctgaggcatgtccacctttgaggcaagctaagccaggctttgtgaaggcagaaccatccgaagcacacagccccaccaaatttctctccctccttccctccctcccctgttcctctctccttctctttcttttttctctttctttctctttctttctctttctttcttccttccttcctttctttctttccttctttctttctttctttctttctttctttctttctttctttctttctttctttctttctttttatttctttccttctctttctttctttttatttctttccttctctttctttctttcttttttttttctttctctttcttctctcttcccccctcccctgctctcccctgctctcccctccccttccctttctttcagctgctgcttacctggggtaacatggtttgggaagaaacatgtcagaattggagtgaataaatataaatgataaaaagacaaaatgaatattattttcaagagtaattaccagtatgaagttcttcagatgataacaaaaactattgacttattttgtctaaatcaatgccactatcttatctgtgtgattgtgaagggaggaaaggaaactgttcactgaatattctgcatttgacccgtaaatacctacttttgtattcagggatgatatattcttaccttaaattaatgactgttttctactgttcttttttggtgcaaacaaattaaatgtgtgcacttctccatgactgattgtgcaaaaactgcttagacaattactatctctctagcttttgatcagaaaggactaccttgaaacaatggccacaataatggtattattctcaattctagaatttatttaaacaaacaattcaaatcatatttcataatacagttctctgaaggagcttaaagagattcagatttttccttttgtttaacatggctcttcatttagtttttgaggcatatttttaataaattttgctcagtactgtctactggagctgaaaaaatctaagaagacacaaaatggctgaagcataggtacttacagaaaagcatgcctttcttttaagaatataaaattaatacattatttatttattatataatgggatgttctacccttgttgaagattttagcagatataactcatgcacagtgtaagtgagcattcacccctgttttgtttatatggcaggactatttctacaaattttacaaattactgtttaggatctttatgacatccattgagtgctggcatgataaatgattttctatatatctgtctacatattgagggcctgattgatggcccttctgacttggggtcagcagtgagttcacatctcttggtatactttggcttattccctggaagtataaacagaaatccaatgaccactattttcattattttccttcaggcataatctgacctaatgatatgtaactgtattactgtgatttaagagatttttaaaaaactataaacattttgaggaaaagtgaaaatggtgattttaaatttaacacatttaaatattcattttatgaaaagaatatttgaaagaatagggatttatcaggatcaatagaaggcttggagtaacctaatcattttaaattttattccttcttgtttttttctgttttcccacaacttattcactaccctctatattctcatactttgctaaatcatattaatccttcaagagttggtttagatgaagcttcattcatttgataaagattaaatgagtgtccagtagttgctagctcaccttgttctgttgtgcttcacagacaatgtgttttatttttatttttattttatttttttacaaagtgaaggtttatggcaaccttgcttcaggcaaacatgtcatatattagtgctatttttccaacagcatgtgctcgttttgtgtatgcttcacattttggcaattctcacagaaatttaaatttttttccaatcattatagctgttatggtggtctgtgatcagtgatttttgatgttattataatttcagggggtgccatgaaccacaccaatatgatatggcaaagttaaccaataaatgttgtgtgtgttatgacttctccaccgacagaatgttcttctgacttgttccttctccttgggcctccctgttccctgagacacaacaatattgaaattaaattagaccgagtaataaccctacagtggcctctcagtgttcaagtgaaaggaagagtaacatttctctcacttgaaatcaaaagctagaaatgagtaagcttagtgaggaaggcatgtagaaagttgacaggttgaaagctagtcctcttgcaccaaacagccaagttgaatgcaaaggaaaatttcttgagggaaaattaaagtgctactctaatgaccacaaaaatgataaaaactgaaacagctttattgctgatgtggagaaaatttgagtggtctggatagaagatcagaccagctacaatattctcttaaaccaaagtctaatccagacaaggccctaactattccattatgtgaaggctgagagaagtgagcaagctacaaaagaaaagttggaagctagcagagattggttcacaaggtttaaggaaagaagtagtttccataacataaaagtgcaaggttgaaagagcaagtgctgttgtagaagttgcaagttatccagaagatctagataagatcactgatgaaggtggctacactaaacaacataatttcaatgtggatgaaaaagtcttctgttggaagaagatgccacctaggactttcatagctagagaagagaaatcaatgcctagtttcaaagctccaaaaataagactgagtctcttgttaggggctaatgcagttggggactttactgcacaggtggtaggtgccctaacccccatattgttaaagggtcaatggtttatagaaataatatagaagtaagtgtgtgattctatctaatctatctatctagtagtatctgtctatattcatattccctatatatccatagtccctacagccatccactgaggggagagagtgggcctgggagtagtaacactgaaatagcacgaatctacttagcaccgaatctttgttcctaaagaccactcatctcttagaggaaccaggattccttggagaaatggctgattccagggctgtggtggggaagtacaaaatgagcctagaacatcttgtgtcataaagtaagaagatacttaaagaattattagaacatgtcaatatgatccagaatgcagctgtatggggtctatactgtccaaacctggaacaacttgagcactgaaatacatattgagagtaattaattatatcccactgagtaaaatagagactcatgagtctatatagataaaaataagcctaagcatatattgaatttttaataagcaataggatatttatacagtcttgaagtatctgctcgcaaaatgtttgctaattgcaaaggggaaaattgtatttttacagtgtggaagcctggcagatatattaatgcaaatgattaaagttaacatcattaataatggaacaaatagaaatgatgtaagacatgataagatataatatgatcactgtatcacctgaatttaatcatgaggaaaaattagacaaacccaaattgagaggcaatctacaaaataactgggcggtcctctttaacagtattaagatcagaaaagccaaggaaagattgaagaactctttttttttttgggtcggcactgcttttttattttattttattattattatactttaagttttagggtacatgtgcacaatgtgcaggcttgttacatatgtatacacgtgccatgttggtgtgctgcacccatcaactcatgatttagcattaggtatatctctcaatgctatccctcccccctccccccaccccacaaaagtccccagtgtgtgatgttccccttcctgtgtccatgcgttctcattgttcaattcccacctatgagtgagaacatgcagtgtttggttttttgtccttgcgatagtttgctgagaatgatggtttccagtttcatccacgttcctacaaaggacatgaactcatcagtttttatggctgcatagtattccatggtgtatatgtgccacattttcttaatccagtctatcggtgttggacatttgggttggttctaaatctttgctattgtgaatagggccgcaataaacatacgtgtctctttcagatcaaaagaaaacttagagtcatgacaactaaaggcaacatgtgatttggggctggaggtgttttttctataaaagactttttggggtcattgacaaaacttgaatgggctttaaagataaaatggtaatgatatacgaataactttgatgtttacatcgtgcttatgtaaaagaatgtctttttgtagcaaatacacgttgcggtattcagggggaatgggtcattaggtcaaaaatttaatctcaaatgggtcagaaaaaattctttgtactactcttgtgactttcctgtaacgttgagatagttattttttaaagtaataaaaaacagaaactactgattgagctgcattacagatagaatgggaaaagagaaaatggacagaggaagtacaaacaacttacttgaggaacacctcaatagagagaagaagagtaacagggaaatatttggtggaggagacttccaagatattttcacgttctcatctttgttcctaaccactttattcatatttatttattatattgcctcctttcattgaaagtattttatacgccatttctattacagattgtaaattccttgaagaaaaggtctgtgctttatataccccttatgtgtagtatatgtagcatcacacttagcatatcataatgtgcttgtttcatattcaaacaacaggaccattttcaaacaagtgattggattttagtgagagtatgaagagcagttttctttataaacatgggagacaaaagaggttgactcacttttaaggagaggacattgtagttataacaagtaacttctagctcattgggatgtaacatgctgaaaaagttttctaaggtattttacagctaacttgataatcttttggaaatcatctgttctccatgagtaaaatagaaaaaggcacaatgatatattgaaataattaagagtatctaatattgtgatgaagtgtgcaccaaaagctttcttaaatgtagaagtgtacatgacacctctttaagcagtatctacaaaaaaccagctggaactctccctattccttaggaattcaataaatcagactgttggcagattttccatcatgtatatgtgtaaattaatagcttttttttggcagtagagagaagagagtaatctaaatgtgtaggaagaagaggccatgagagtttcacatccagtcaagataggacaaaaaaaaatctacttgcattcctatgttaaatttttaaagatcaattaaatggagacttgtttggtggaggttgcagtatatgaagagctttaatagagatgaggggagaacagcaaatccagagaatcatacccagggcacaaatgtaatacacgtaggctttttctgtagattgcttcaagagcctggcttggcttgtctgagttactcagagaggaaaaaatgaaagtgagtgtatatgttggtttggggtgtgtgaaggtgtgggaatggagagaagtggacagagggaaaatgtgttgaaataaaacaccaggagctcatggaaaatgcaaaacagaaacaaaaccaagaaaaaatctttgaggggcatacctgtgtatgaattcatttttccatagcacctttaacatagtcaaaacaaataaaatttaagcagttattcagtcaaactagtagcaggtgcacacacacattccaaacattacaaatatttgtgggccacccacctggttaatttctgccaaagcaactatccctgaataatttcctcaagtacttattcatattgtttgtataaacgtcactcaatagagaatatttaataaactggagcatttataattatataaaaattcatgtcagtaaacaaggccactctgaaaagttatgtgaagaatcacagtatgacacattttgttagaaaacggtgccttttctttattgcttagagttgtaacatcacatagttcatgttgttgttttcattttcggggtatcaattagttgatcaatcagttagtgtttattaagcttctgtccagcaggtaaagcatgctcatcaaatttgcaaatgacataaatgttagagggatggtaaaggcactgcatgacagacatagcatccaaaaagattttgacagctcggagcaataggctgaatctaacaagatgaaatataacatagataaatataaatgcctacctttgggtccacaaagccaactgtacatgtatagcattgagtagatgtgaattagctgttgatgtaagcaggaaaaaaaagacagtattttagttaatagtcagctcaacttaatttatcagttttagctgcatgatgtcattgccaaaaatctagcctgcaattttgaattgtattaaggtgacaatcctgtaccagtttgacaggtcagaccacatctagagattgtagtatttctggagccacattttaagaagagagacactaaaaactatgtcatatttagaacatcacagaaactaaacacatttatcctgaagaagacttaggagaggaatgacatccttctttacatttatgtaagctctcacatggaaaagggattaaatttgtttggtgcagtctcaataattagaactggaacttgtgaactgaagttataaggagatacctttgggttcaatcatttataataattacatataatagtaaaagctgttcagagagaaaggcgttcccaaaatctgcagaggcagaatactagcacagtttagcctgagtgtcctcctttgcaaagtggggacaacaccattgtgaagcagcgatctgggaaggcagtgggatgatatagggaaaatgttcagcacaatgaggggcatgtagtaagtaagtggttatagtacacaggggatgtcacctttcctattgtgggaggtggtgacaccaatcctgaatcatcactgggtagaggtatagaagagatgctaaatggatggatttgacaaactgactgttacttcaaaaccctaactgactgcaacttattaattaaatttgccatttaaaactgtctctgaaaccaccagtcacgcttctatagcaccttgagtatttttttttttttttttttttttttgagacagagtctggctctgttccccaagctggagtgcagtggcgcgatctcggctcaccacaacctccgcctcccgggtttagcaactctctgcttcagcctcccgagtagcccggattacaggctcgtgccaccatacccagctaatttttgtatttttagcagggacagggtttcaccatcttggccaggctggttttgaactctttacctctttacctacctcgtgatccacttacctctgcctcccaaactgctaggaatacaggcgtgagccaccgcaccaagctattctttttttcttttttttctttttttggatagagtctcactctgtcgcccaggctggagtgcagtggcgtgatgtcggctcaccgcaacctccacctccccggttcaagtaattatcctgcctcagcctcccaagtagctgtaattacaggaatgcaccaccacaactggctaatttttttgtatttttagtagagacggagtttcgccatgttggccaggctggtctagaacttttcacctcaagtgatccgcccacctcggcctcccaaagtgctgggattacaggcacgcgccattgtgcctggccaaatttttgttttcaatcctctgtgcttatttttaattatctttaaaatggagaaaaaggtaaacctgccttaggtaactgtaaagttaaaaagaatgaatatgcataaatattttagaacaatgtctgacatactttttttttttttttttttttggcagagtctcactctgtcacccaggctgtagtgcaatggcgccatcttggctcactgcaacctctgcctcccgggttcaaaagattctcccgcctcagcctcccgagtagctgggactacaggtgtgtgccaccacacccagctaatttttgtatatatatatattttttaagtacagacggggtttcactatgttggccaggctggtctcaaactcctgacctcatgatctgcctgcctcagcctcccaaagttctaggattagaggtgtgagcctccatgcccggcccatactagctttttaatatatgttaactacttttgtaatgccaaagtaggtggcaaaggattattggagaagagaggacttgagatgtgtgttttgaaaaatactaaaaatttagttaagtgcctatatggaaatagcttgaacacatcatgagattaagtggtgtgtgatcgtcagacagtgaggagactttaccagttagattggaggtcggctgttggtgaaggttagaaataaattgggtgagatgagtgaggaaaaatctcagaaggccttaggtttaggatggtaagcaataggatgggatgtgtggggattccacgtgttcgtaggtaggggaatacaacatacatgtgatttttaaaataaacttatagagttttcaggatacattgccttactttagcttaaaaattatggatggaatagtggaatctttttatgcaaatccttctttcacttagaaatagaaatttctatttcagggcaatttctatttcagaaagtccaagacttttctcctccataaagttttctcttctgattcatattacagtggttttctttttgtttgaatttcttagcattcaaaatgatgttccttatatttgtatcatccatcatgatcttttaaggggaaatttaaatttaagatacgttgtcaaatcgcttaatgttaatctattagaaaggtgttattctgaatgcataaaatggttttgctttaaatgaggccctccaaattaataaaactgctcttcctgggaagcttctaagttggttctgggaaagcaagtcacacagagaaggtccaaaaatacgttatacaccacatatattaacaaattaagacataatttctcaaagcaactccttggaaaagataatccttcttgactgcattaagattcagtatttaagttagaaacaaccatcatcatttatagtgattcaaacactatctagcatattaaaatgtattttgttgtcatcatacatacaagctccttgagagaaaggatcatgacttaactcttgttggtgtagctcatagggccactgtgggtaccgagttgatgctttatgaattcagtttaaattagaagaatgtaggcaatgggattaccatttgtccagtaacaaattcagcacaggtattctgtctctctatttcccagcctgagtcagcagtttcttttagttctgatggccagcaggagtaaaatagcagcaaagatctggcatttcagtggcacaggtgattgtggaaaattactataatctaggtggactcgattctattttccccttgctaggtactgagatattgtgtaactttctggacttttgaattatacttctcactaatctagcatgagaatgggtggatagtgtcaagaattctacttaaaaaaaaaaaaatctagtgtactcttgtactcaaagggatgagtacaatctatcacagggacacaaatgtgaccaaaaaagtggttaaaataaaatatgaaactgaagagaatgaagatttgagcatgaccttctctgtatcttctttccaaagtgttttcggatctcttatgaaggggatttaaaggcttttctacaactgctactgcttttgtcaattcattcattcaagacacaccaataaacatgcacgagctcctcttgtcctcatagggctagagaatgagataggtgcaaagtttattttagcagaaggctttcttttcacaaatcagaaattccattgtatgtattcccttaaataactggcaaggggaccatcggaatgagctatggcaaaaatccacctcagtctttacagcttcagggtgatggggccccagatcagaattgtaaaatagtttagagaatcttggaacataaaacatggtgcagaaaaaccaaggaagatttaatcttatgtatggaaaggtggttggtagtggagggggcaatggaagagagtggcttgggatcatcattaatcattatttaagtacctataaagtgaaaatatccttctggaattcactgcaagtgacactgaattcttctactaagcaaatatgtgatgagttgataaaaaagaaggtcctgaactcttgacaacagatataatacagtgaatacagaaaatcaaaaacatgctttctatctgactcaaaataaaggtgcacttaaacttgtaaaagacaacatttttatttgaatgatatgacagaagtgtcacgggagtgttacctgctataaagaaagcctaagaattattacctttattagaccagtgacactgagctttagccatacatttctaacttctgtccctctacagagacaattttcttttcttaaataaactgtcatgctagtgttaatatattgttggctctctcatgctctgagaatactgctgatataaaacatgtatatgttagattggtaatagtatctttagtgtagctgactagaacaaatgtgtttccctcatggctgtgctaatgtgataaaggaaaattggctgttcatcagcttttggctgggtaaagacagtagagatggaaccacattcttttttatgcattaataccactgagaacttttcactagttatatttcatgtgcctgcatgttgtgcaaagatgttgtaaaacatgagataatgctacaaataacaaagtagaaaagcctgtatcttttataatgataacagtcaaacaccaaatgacagtaacaggctgtaaaaaatgggatgcaaaaaaaatgcagccctactacccaacaaagcggaatatatccaggcccttgaggacttggtatatgatttgaggtatattaaagctttgttttaaaattaaatcaaatgcaacactagatcaatggatttaagaaagaacatagtttaaatgaaagtagggtggttagaatggagaaaagccattgtgggtaacttcttgaaataatccgtattaccaagtaattattgtagtaacttcctgttttttttgttttgttgtgttttgcttgtttttttggggggggacattgaaaaagatttttaaggcaatagtacacatgattttaagatgtttgagaataaatgtttatcttcattaattattgcaagtctttttaacataaaagcattaaaagtataaccagtttcaggctcacagcaaaactgagtggaaatttcagagatctcccaaacatgctgtacccccatgtacccacagcctccccctctattaaagccctgcaccagagtggtatatttgttacaattgccggacctacactgatacatcattaccactcaaagtccatagcagaatagcatgttgaatgttttgctatcattttaattaaaatgttaacatccaacctttcctttgcatgaccttaaatctcactctttcctcccctctctcaacccctcccctttccagagccttttatttgccatttcagctccttcactaattagagtaccaattattcctttttcatttaagctaaaagcacttgaacaaaaagactatttgcagagatgaagttgatgtccaaacagctgattagtttatttagaagtgtatgcaattaaaaattttgtgcaggtatctatgggtgttttccataaaagtttgatagcattggctattctgggctccagtcgcataaacaaaaatcccatagctttttaatcatgtaatccaagagttatcaagctacaacctgtgggtcaaattggctggccacctgtttttataaataaagttttatttggacacagccatgcccatttgtttatatattgtctgtggatgcttttgcattacagcattagagttgggcagttgtgacagtaaccatttggcccataaaaccaaaccatttgacttgcagagaaaaaaacattctctagctatttacagaaaaaaaaaattgctaatccctaatatgtgcagttattaggctacttgcttgattgattagtctagaatatgattggcaactttttgttaccctacattggaaaagtatatctgaaaatcaccaaccggataccaatacccaagacagtaaattcaagaaatatttgatcctagtaacttgaattatatccacatgcaattctttgttgttatatctggttttaattatttctttcccttgtactcattttgctctatttccaaatatagccataacaaatttaatttgtatttaaagaagtaacatatcctcaaaaaccctgtaaaacatggcaaccagagctgttacatgtatgggacaaactattatgtatacctgtgaacaccctgggagatatcatcacagcacaaaatgacactatataggtttatatctagataaacacatggagatatcactgagctattaaaataatgttttcagtcttcccagctgaacaaagtaaagaagaaagaaagttacttaataaaaactgctgaaatgtgtttaatataaaataaaagtttatgcacttaaactaataatggtggtaatttcttacaggtgcatcagacaaaaatcagcttctttatcaatggcgtggagaaggatcatacacctttcaatgcaagaactctaagtggttcaattacagattttgcatctggtactgtgcaaataggacagagtttaaatggtaagtttctgacttcagaatgttatttatttcatccaattacattgttcttaaaaatgcatcaaacaaataatattttaaaatatctacgtgtattcatcttctagggctactgaacaaattaccaccaactggatggcagattaatgaaagtaaaatttattttttcacagttttggaagctggaagtcagaaattaagggttcagtggtgttggttccttctggaggctctgagggcaaatctattccatgtctctcttcgtggtagctactggcaatccttagtgttcctttacttgctgcttcctaactgcaatcttgcctcagtcttcatgtggccttctcctctgaatcttctcccctttacctctgttataaggacacttgtcattggatttagggcccactcacagtcaggaggatctcaccctgagttccttaacttaattatacttgcaaagaccctttttccaaattaaagtcatagttacaggttccagatggataatagatcttttgggatctactatataacttactacatttgggaagctttcaaatataaacttctttattctgatcagtttttaagtaatttcaatgtgtaataaactatatttcctttctgtctcttttctgaggggtttgcattttcatgtagagaattgttaaagtagaactacgaagtattagatggaacctgagaaatagtattgacatgtaattaactggactgatgtttacatttactacattaaaaatgggccatatagtttaagaagatatcatatactatatattgaataaaaccagaagttgaaataagaaattatcttgaaatatctagtacagtggtctttaaaatgcctgcatattaaaataaaaatagtattttatattattatataatatatgctcattataaaaaaatctaaacaatatggaactctgtgaaatagaaagtattttccatatttctatcttcagagatagatataatttaacttttttatactcctacagatttttagtacatttttagctagagatatagttataaatacatttttccaaaaataaaattacaatacatatgcttcctctgagccttctaaaaataaatacttctccttcaaatgttataaacaacgtttcatgtcaatgtatcttctcatttagatatatgttctcatttaaaatggctgtattctatgcaattgtatagttgcaatccatgagatttcttaagctcctataatgaacatttaggtttttttaatgtttcagtgcaattagcagttattttatggaaaatattatatatatatccacatatatttatatatctgtgtctatatctacatttccatttatatatatcaaccatcaatctatcaatcatatacatagatgtatacatacgtacatatgtatttgagcagttgcctgattgcacagttccttaatatcctatttggtgccaacctgcgtgaattcatatcccatttcctcacttactagctatatggcctggcaagatattttaatatctctaaagtgtagtcaccccaactttaaaatgatgatgatgatgatcataatattgatttcccatagggccaatgtaaggatcaaatgaagcaatgtcatgtaaaacattactgtgtttcaagcacctggcatgtattagatattcaatatttatttgttaaatgaatgaatggatgaagtgctaagcacaatgcctgtatataaactatattttctctttcttgggcatggggctggattttaatgtacagcattgttaaagtaggactgtacagtattagatgaaaactgagaaataatattaacatataattaactggactatgtggtttatattttcgcacactaaaaattggccatgtagtttaagaagataacatatatgctatatattgaaaaaaattactaaactatatcagtaaataataataatattattattttattattatttttttttgacagggagtttcgctcttgtcgcccaggctggagtgcagtggtgcaatctcggctctctgcaacctctgtctcctgggttcaagtgattctcctgcctcagcctcctgagtagctgggattacagatgtgcaccaccacgcctaacttttgtatttttagtagagatggggtttcaccatgttggccaggctggtctcgaactcctggcctcaggtgatccacccaccttggcctctcaaagtgctgggattacaggcgtgagccaccgcaccctgccgtaaataatactattattaatgttattataattatttccaaaaaataaattcatagaagttgaatggctgggttgaagtatatggtcattttatattttaatacatattacagagattgctctaatgcataacaatgggctacctccagaaaggttgtgaaaatttataacctcattaaaatatatagccaagtacttgtttccttaaacactaactatccttacaaattatccacttttttttcacccttgacattcctctaagtgaaaaatattgttgaatgctgactcagaattatttggccattaatgagtttgagtagctttttacgtatgtcttgatcatttgcatttcatttatgaattccttattcatacaatgtgtccatatttatactctataattccttatttatttataaaaactcatttatgttaagaatattatgttgtataagttttcttcagttttttgatggcttatgaactttgtggtctagatattttaaagtaatcctttaatatttaagcaaaataaaacatgtatgcaagatagtgcataaatataaaaggtatagcttgatgagtttttaatatttatatacacctgtgtaactctcatttaaaaaaagtcgtagaatatttccagaatctcagagtcccctaatgaacatccactgtaaagataaaaacagaatagcatcaatgtagccctctataaccatagattaatgttgcctgttctcaaactatcatacaaataaaatcatgaagtaggtactcttttgtgttctttttgcttagcactatgccaatgagatttttccatagtgtatgcagttatatctttagctttagcaaataattctgtaaagttttccaaagtgggtgtcccaacaagcaacatttgaggatttcagttgttccacatccttatcaactgttagttttgccagatgttatcattctttgccattcttgtagccatgtagtgcatttcctgatcattagtgatactgagatcttttcatgtgcttatttgccaaatgaatatgcttttttgggaagccttttgccaagttttaattggacagtttgtatttttcttaataatttataggaggtcttccatattttgaatatgagttctttgacaaatacatgatagcaaatatggtcttctgggctaaggcttacagtcacattctcttgatggtatttgtcgataagcagatcttcttaattttaatgagtctaatttagtcattgttttatacttaatactttttgtgttctgtttagactatttttgcaaaccctgatatcacgaagatatcctcctacagtttattcaggaagctttattattttacttttcaaattttggtctatgttctatctggaatagattttttgaggttatataaggtaggggtcaaaatttttgtcccacctgaatgtgtaattaacctagaaaaccttgcctcttgaaacaaatcaatgtttctaccattctgcagtggtaacgttgtcgtgaatcaggtctctgtatatgtgaagatgggtttctttctgaactttctattctgccccagtgatctgtctgtctgtctatacttgggccaaaatatttagttttaattactgtaacttcatacatgtcttcatatctagtagttctccaactttttttcttttaagattgccttggctattatatatgaattttagaaacagtttttcaattttcataaaaaattctgttgagatttaaattactcatttgtatttaggagaatgggcatctgaacaatatcaagtatccagcccataaatgtaatatattccttgatttctcccagcaatgtttttagttgtctgtatagaggtctcactcctatttgttagacttgttcaaacatattcattggttttccttcttaatagactatttttttagagcaattttagagtcacagaaaaattgagtggaaagtatagagagttccagtatactctctgctcctacacacgcacagccttccccattgtcaatatccctcaccagagcggtatatggtatatttgttacaattgatgaacctacattgacacatcattatcacccacagtccatagtttacattaaagttcactcttggtgttgtacaacgacaagtatccactactccagtatcctacagagtagcttcactccctaaaaatcttctatgttcctcatattcatccttatctctatcctaacccctagcaatcactgatcttttcactgtctctgtattttcaccttttctagaatatcatatagttgggataaaaaaatcatgtatcctcagattggcttgtttcactgagtaatatgcatgtaagatttctccatgtctttcatggcttggtggttcatatcttcttagtactaaataatattccatggttagatatagcatagttgatttattcattcacctactgaaggacatcttggttgcttccaagttttggcaattatgagtaaagttgctataaacatcagtgtgtaggtttttgtgtgaacataagttttcaacttataaataccaaagagcgcaattactggatcgtatggtaagatatgtttagttttgtaagaaactgtaaaattgtcttccaaaatgactatatcgttttacattcctatcagcaatgaaagagagtccctgttgccccacatcctcaccagcatttggtattgtcagtgttctggctttttggcctgttggttttcatgcaattatacttagtattgtttttgaacttcatttgctaattttgttactattgcattaaaatctaatcagtttttatatttacctatgtttagtgaccttgccaaactcattattatgataggtacacaatcctatcatttgcacatatcaggaactcaactctttttgaatgtttgtaataaatgtatataatggacatgccataaatatctcctgtagatatttttgtctgatgcacttattaattctgaaataatataaaatgttattttgtttttctgtatgacctgagttattagaccaatgtctagttttaaaaaagaaggtatatatttttgatattcaaaacactgtggttaaattgccaagctctggtttaaatataacccaggtgtgcttctttgatcaaaatattaactctctttaagtctggtttctaatctattaaatggtggtttaatatataattcataggaatcttataagaattatgtgagatgatgtatgtttagaatataagttgcttgttgtatagtaaatgtgcattaagtggtaactatttttaaactctttgaacatcaattttcttattgtgaaacaataagatagggataacactatatttccatatgattgttgtaccaatcaaaagagaaaatatgaagaccgtattactttagtttgtgtatgctcttagatcaagctaaactcatgtgaagaagcaatattttaaggaacttatatatttaggaacttggtttgagtaattagtataatgcataatcttataaaatactctgcgtgaagaatttttaaataacacattaaatcttgtgagccttatttcaatatttaatccccattagtacttctaaaagtgttttattgcaccaaatgttgctcaaagtatttgatagcgccataaattagtcccctatgcactgcagggttaaaatggcttgcttctattctacttcagtatactaaatgttggattaatgcttcaaaagaacagtgtgaactgaagatgatatttttaaactgtgtagaaataaatttcactcctgattagaaaacatgtaacaggaaaccggtttatttcaaatattatttagttttcattacaactttctcctttatgttcttgacatctgagagctacagaaggaaaaggatattttaaataatttttatctttattctatcaatttatatgtacagtcgtacctactgtatcttttctctaattagagatggcgtatagactggctcattacttctgcctaatgagccaggctccatgccacctctctaatcagaaaagagataggtacagaatgttcctatggacttattataaatcattttctttctcttacttgctcctttttttaatcaaaaaattaagtcactgtcctccatacttttgtccatatccaagatggtttctttcaaaagaggtaattgtgcaagcgattactgagctgaattaaaggtgctctcatgcagtgccaggccggctgtctctgctttggaacagacactgcctcaaacacaagcacatcaaatgaaggcctatagcagatcaagatggatcttttctgtctttctctgattaggtttgacttggttctctgtttctgcacccagaaagtaacaaccttccatatgagtgttggctactacagagctttttctttgagtcttatctctagcataactctctagaaaaatgtgttgccagtgacactttctgttactgcaggacttgtctttgctttccctggaaaagtaatcaatggaccaaatgcatgctttttactgaaccctcatttatccttattaatggtataatctgatttgatcaggctgaattttatgtatacaaatagaaacaccttagaccatctatatcaaccaaagtgtgatggctcctttttagaacattttcttttagttgtagatttattttagtgcttccaattgggtatataacctggagcacttgtgttagcagatatgtagttatgaggagtcagcaatgtcatcgtggtaataaaccatactagctctccaaattttggatttaaaattacagaactacatgaatcaaaacttttcccagttatttctgaacttgtttatcaacagagttctagttgccgattaaaggtgagaatttctacattatacattcaaatgtgcatagcactttcttaagaagatcattggtcattaaggaatcaataaatatttgttgagtgtctgttaaagtgaatatgcagggaagaaaaggatcatcgtctaaagctaactcctacttgccttcctttctgtgttttcaacgttgtgtgtcttagcccatatgcttgtacttgattctaaagttggaatgctacttctaatttctaccagtttcccatgggttcacatttctaacctctgctagatacacaaactccattttagttcagctgaaatcatgctaatttttttcagagagaattatttttgggaattagatttaaaaaaagcttagaaagtattgaaattgactaagagattggaatggaagaagagtataggaatatagtatatagataggagtttacttagtttcagaacattgcagacaaggtatctagcaatattatcagacaagttatgttgtatatttaaaatgatgttaatgtagctctctcaaccatactaagtaaaaactgctgattaattaaaatttgaatgcaaaatatgcaatcataaggtagtagaggaaaatgaaggcaagtgtttctataattctagcatattaaggacctttattagcacgataccatgtccagaaacactaaaggaaaatattgaaacatctgactattaaactgggaatttaaaattcaaacaacgattatcattttgtacttgatagtttggcaaggactagaaaagcgattataccggtgttggaaatagtttggggtaacctggcaaactatcaaaagtaaaaatgcgaaaactacttaatccaagatttctacttccaggacactatctcgagaatataattagacaaagacttaaatacatactcaaaatgttcattgtagaatgatttaaagtaacaaataactggaatcagttaaaaacttcaaaaaggaattgatttaataaattataattcatgcctactgtggaatagtatacaccatcaagaggaatgaaatatgtctctttctatgtacatggcaatgggttcatgatgtgttattacatgaaacaaacaagattgtatagtacaaaattctataaatttaatgtatatgttataaacatacatatacatattaaagttctggaaggaaatatgccaaaatgttcttcagaatgttagtaatgttaatctctatgagtgggattgcaaataattgctttttaaatttctttttgtgcaatttttttcagtaaactataattttataataagaattaaaaatattttccaattttggacaaaataataaatggaagcattttcagaatagatttattctatgaatgtaacaagttcagccagagacacctaatttgtatagtacagagggtggtcttgaaaatgttagtcatttaaattctgtacttgtcacatggattcaggaaacacaagcgttcattggacatttaactcattgtacatacaattattattactataataatttgtgcctgagaagcaaagcatgagatttagaatcagacagatttgggtttgaatgctagttctgcttcttaacagccaagtgactttggcaaagaatataacttctcaatccaatttcctaatatgttttctcatttataaaatgtgttttatacacatacttttcagggtgatcagagagcttataaataacacatgtttgattcatgttaggtattcaataaaatttcgctatcataaatattattgttaatttagttattaagtttattgactgtgatacttaaaattttaacataatggccatgaccatatttaattttttttggctgaaaatcaaaatttacttagggtgagggagaaaaaaagtccagtttagattcattatgtagcagatattttaaaattctgtgttttgtctatgtaaaccccacaaaataatttctctctctttttaaagatctgtcctttctagtgttcttcaatgtttcctgttcatcctcacttccacctgatgctatttcttcttaatccgaagaacctcccttttcattgcttgtagctcagcctgctgaagcaaattctctcagcttgtgtaaaaatgtctttacttttgcaggatattttcatttgatatagaattctacattgattactgttacttcttttagaactttaaagatgttgtttccttgtcttcttgccttcattgtttctggtgagatatcagccactatttatataaatgttttcttgtatactatatgtttctttccttctttctttctttctttctttctttctttctttctttctttctttctttctttctttctttctttctttttgaagcagagtctttcactctgtcaacccaggctggagtgcagtggtgcgatcttggctcactgcaacatctgcctcctgggttcaagtaattctcatgcctcagcctcccgagtagctgagattacaggtgtatgccaccatgccaatttttgtattttcagtagagaccgtgtttcaccatgttggccaggctggtctcgaactcctgacctcagatgatccaccctcctcagcctcccaaagtgctgggattacaagtgtgagccaccatgcctggcctatatattgttttccacttgatgctgttaagattttatttttatctttcatgttatcagtttatgatatgcctaggaatgattttcattatatttgtcctgcttgaggtttgcttaaattcttggatatgtacgttggtgttttcattacatttggaagttctgatagttgtatcttcaaacttttctttctttttttcctttttttgcttccttttctttcttctgtaataagactctagttagattgatgttagagcactagatattgtcccatagatattgggtacagttttgtttgttcctttgttttcattttccccactcttttttgtgtttcagtttggatactttctatttgacttgtctttatttcactggtcaatttctcttttgtgtctaggctgctgctaagcccatctagcaaactgttgatttctaaattatacttttcatttcaagtattttcatttggccgttttgtagacttcatctattggctcaaattcacccatctatttgcatgtattattcactatcacccctagatcttttagcatttatattataggtattttcaaatccctatttgataattccaacatctgggccatgtctgcatctccttctattgactctttcctctctttacaaagggccacattgtgttgatttctcatgtgtcttaaatatttttattgtatgataaacactttgcgtaaaagaatgaaagaggtggaagtaaatcatattttttggcgtttttccctttacaaagaagagcactgctggttctatgagaccttttgaatgggggtgggcagtaggaaagaaaaaataccaaactgacttgaagttgatctgtacgtgggctttactacagttttaatattatttagctcactactggtttcagatatctgtggatagaattgaaaatagttagacacatgtctggtggggcctccttagaattctaatatgtcattctggcctctgtatggctgcttctttcttactccttctatgcctgaatcctctatttcttacctctgagctaagtatgggagtagccctgggtctcgtccaatgagttacatgtccagtaaatgtttgtgtttcctacaaaaggcttattactttctagaatttaattcatttagttttttctgtgcgctctacattttgattggttaaaaaataatgactttagggcttatctggcttgttttggttgttagattgacagcaaagtgatggtcccttacaactttttacatttaaagcagatgttgaactattataacaacatctaatttatacccctttttttctttggcacaactctgtctatacttaactctccaaccctctagattgtttcagctatggctggtcactgactctgaacaaaaaaggtgcatattacttggccccaaagattattttggtagaattcaggcatcgacgttttaattacctcctctaatttttcatggggattttcagcttttgtgggccctaatttatccctgactcttaacttttatatctgtttctttggtttgcctgaaatctgtttactgctaatatttaaaactgaaacatgtttttttataaatctagccattggatcttgtttcactaatgatcatgtggcatcgtttaatctcggtgcccccagcggctctgtttgttcagtttgtatagcacatgcatctcttgtgtttctttttctgtcagatacataatcatattgattagtgtataccccttataccctgagtccaaaaattcctcatccctcccgggatcttcaaatgatttaacgactttccactatctctcactttttgatgtggtctgttccctccttactcaacttaagtttcatggccagttattataaccacttcttttcatggaactggacttccctgccgttttttcttcacttctactatgatcttggcactaccacagcataggttaaatatacccaaagaggacgactcttcccaccttaaactcatgaccatgaacttcctatgtttcctgatgctgccctgtgatcattccatatttccctcattcattcactttcctgtcttatgccaactatttatacattttcctttctcattatcctgatcctcagtgattatattacctccaactttaccataaaaattaacaaaaagaataaaagagcttctatagatttccactgctatatttatccaccactggcataccacctattaatagatctgaccaagaatatcttgcctcatttttccccaatttactgctgtattgtaaaattttcttgtattaatggaacattttcaagggaataaaggcatgttgttatttttccatgaaaaattattcttgaccctcccccatttcttctactagccattgtcttatttatttgctctccttttagcaaaacttcaccaaagtatattcaaccataggagcctttaattcctcttttcaaattccaccatctacagtcagactttagctcaccactgcacttaagctacacttgtcaaatctctactcaccttcacattataaatctaatagttaatttcaagtctttatctttttgacctattaacatcatttaatggagttgatcgctccttcctccttggtatacgttcttcacttggcatctaacactccatcatctctctgagtttctagttgctgcgtctcagtttgatttactggttcctcttcatctacttgacctcttagtattggtaccccaagccttaagacttagctctgctcccgtgtctacagacactcactcccttaaagatcacctccagtcttatagctttaaatgtcatctaagtgacttgacctccaaatataaatctccccaccccagcctctttcctgaactccagacgactctgttacatgtatcaaactacccaaagtctccatttgaatgtttaatttacatttcaaaattaaacttactttttttcaaaatggaactggttttcttaagctctctcactttgatccatatactacttcttccatggtcttcctcatcacaagtgaaggcaatttcatttttccactaagacagagaaaaagatttggagtcatccttgtcaattctctttatctcatgttcaacatttttttttttgttttgcaaaatcttgttggtgttagaatcaaaatatatccagattttgaatccttcttagcacttccactagaatcatcccagtccaattcatggttgctgctttgccgggattactgcattgtcttttaactacttccaggcactccgctttattctcaacacagcagccataattgttctgttaaatatcagtcaagcatattacttctctgctcaaaatgctctattgtttctccattttaccagagtgaaaaccaccattcttactataacctacaagacctaactgagctaacagcagttacttctctggctttatttcttacatttgtttattttgttctccttgttttacacaaattggcctctttgccgatttttgactatgggaggtgcacttctgccttgataccattcgctgttctttcaacctggaacttttcacctcctgatatccatcaggctgactcccttacctgattaggtctgctcaataccagtttcttaaatacatctttcttatcaccccgtttacatctgcaaacaccacctccccactttgggtctcattatgttgctctattcttttccatagcacttagcatctttaatgtattatagaattgacttatttttgttgaatatatctgtttttccctctataatataaaagagaaagcaagattttttttatttgcattactcactgatataccccaggatccagaagattgcctatcacatggtagctactcaatacatattttccaagtaaatgaatcgatgggcagcttccatgcagcattaagcctgtgggtgtgtggaatgcaagaattgaagcttgggagcctctgcctagatttcagaggatgtacagaaaagcctgggtgtccaggcagtggcctgctgcaggggcataaccctcatggccctagaacctctattagggcagcgaaaaggggaaatgtggtgttgcagtctccactgagtcccctctaggacattgccttgtggaactgtgagaagagggccaccatactccagaacccagaatggtagccactggcagctttcaccctcagcaaggaaaaactgcaggcactcagtgccagcatatgagagcagccactggagctaagccctgcaaagtcagaggggtagagcttcccaaggccttgggagctcactcctcccaccaatgtgccctggatatgagacgtggagtcaaaggagattattttggagcactaaaatttgatgactgcccttttgggtttcagacttgcatgggggctgtagcctcttttgtttggctgatttatcccgtttggaatggaaatatttactcaatgcttgtatctgaattatactttggaggtaaataactgggttttgattttacaggctcataggtagaagggaattgccttgtctcagatgagactttggactttggagttaatgctggaatgagttaagactttgggagactgttgggaagggataattgtattttgcaacatgaaaatgacatgaaatttgggaggggccagaggcagaatgacatggtttggatctgtgtccccatgcatgttcagttgtaatccccagggtggaggtgatacctggtgggagatgattggattctggaggtggatttttcatgaatgatttattgtgatagtgaatgagttatcacaagatctggttattttaaagtgtgtggcacctcctcccactttgctcctgctttccacatgtgatgtacctgcttctccttcaccttctgccattattgtgggcttcctgaggcctctccagaagccaaacagatattagcactatccttcctgtaaagcatgcagaactatgagtcaactaaccctcttttctttctaaattacccagcctcaggtatttctttatagcaaagcaagaatagactaatacattatcctttgttactgatgtctaaaaatcttttttaaaaaaattaaaagcaagtatattaagacagtaaaggaataaaaaatggctactccataggcagagcagccccaaggactgctggttgcccatttttatggttttttcttgattatatgctgaataaggggtgggttgtttgttagttttccctgaaaggggtgggcaattcccagaattgaggatccctccctgttttaggccatatacggtaacttcctgatgttgacatggcatttgtaaactgtcatggtactgatgggagagtatcagtgaggacaaccagaggtcactcttattgccgtattggttttcgtgggttttagctggcttctttactgcaatctgttttatcagcaaggtctttatgacctgtgtcttgagccaacctcctatctcatcctgtgacttaggatgacttaccctcttgagaatgcagcccagtaggcctcagccttattttacggagcccctattcaagatggagttgctctggttcaaaagcccctgacaattaccccctcctttttaaaagaaagctcttaatcttaagagttgtagagggatgaagatccatcttctctaacttcttcaagctgaataggggtgatgatattcctgcctaacaattagggtctcttgtctttgggatagagaggaactcaatcagaaaatgctggtatgtcaaggtccattcagaatacttgagttctgacaaaagttgatacctggaagattaataagtatttaatttaagaaaacattcggtaagcttatcctacacaaagagtataacagcaatacattccgcagcagtaaagcaaaataaataaaattatcacaactaaactaaattagaagactttccatgaactgggcaattgttagaaccaagctaatatgtggttgctagtaaatcccagtatgtgcccagaattagaatattgatccagattttgacattgcccattcattttggttttttttgaatagtagtcagagatcacttggtggtacacagaaataagcagagtctgtctaaattacagaaaaaaaaccttaaacacaactaatgagactagaatctaataacaggtgtaccatagtttttgaagcaattctttttcttttcagtctctcatttttactaaagacaaattataatagaatcgatttgtgcgcaaaaatgagctttagtcttatacttggcctgattacttgtataaaatgctaaaaaataactatttttcacataggattttaaaattggctttgatggaactttgttccataaaaaggaatctcagataagacctttttaaagctgagcccagccctgggtttgtacaatcaaatacctatgagttgggttaattcctttactcttgaggtcctaagatatcttcgggcccctgagtctatcagaaagtgacattctttacttatcacaggtcaggaaccctgtacagggcatgtgtaaacaaagaatgtgaccagttttcccaaggggtttttattggctttataagtcaagattgattccttaaaggaaagcacaccattccagtgaaagtcttggtaaaataacaaatttttccaattgtgtcctgttacaaaataaaacagatgcttattgcacttatgcaaatatctattgtcataagttaagaatactcacaaatagtttctaaattctgaagaaattaggtagaatcaaatatgccccaaattttgtttacaggagtaaaatttactcaattgttaaaaagctgtaaatagcttaaaagaaaagttgccttggctctgatagcaaaacaaaggatcagcaacattttaagcaaaaagttttaaaagattacttcagctatctattattcagcccatgcagttaactcttgttcagcttgatattcatgaacatttcagctctccatcagtactgaaagttttatcctctcttctaatgtcacaatcttcaaagttattagaaacgtgcattcaagagcacctgtcaaaatcctatagctgactctaaacttactttttaaagaggattaaaacaggtcaacaattttctatggatgacaaaaagttttagaacgacatatattaaagccacaattgataaagaaattttggttagttctgtgacatacaatgattttactgacaattataactattactgataatgtacactaagtcatatcagaattacaggactttcccataattttggaacacaaaccaataacatatttttacaaatacagtccaaagaaagcaaagaccatttcatatttttctatgcttcctgtatgatatttataccaaataacctgaatatgccattttggactttaggccacctaatagctaagagattaattaggtcagaagaagacatactttgtaattttattttggaaagcttgtcaaatattaaaggtttaaaacactggatatcacaaaatataattccaggtcatcataagtcattcattaggccaaaataataactcaaaaatatttaaaggggaaaaacctttactcattaatagagggaagacttagatctccaaaccatctgtctcttttctttcctttcctatataaaatttcttttttagaaacaacctctttgcatagttgggaatatggctaattccacatgtccccaggccttatctagaatctaaagtctccaaagtaggtaaattgaacaattttcaaaagtcaaagaagcagtttctgaccttaaagcatttagtaaacttaatatgtgacctgcctaatttagaccaaatgtctttattttatcaataatttttaaagctgtttttatttcccaaacattcctaaagtcacatgaactaaaagtgattacactttttacttttctgacaaaatatttgatttagacacttattatttttaaaccgattaatcaaagctcttttatatcacatatgcagcacatataaatacacagacagaaaaagatccagtaagatttttcatttttcggtttcttaactggattactggcttcagggtggagccttagaggaacagagccaagaatgcgtgaaatttctaaagcctaataagcaggcacagctggaaggcaaactagatcttcaggaattaagggttccattttaatagcagattctggatcccaaaaagagggaattagcccatctcccatgggagtcttacctctcagtggggagtgggggcatttccataacttctaagtgaccaagagcatgcttctctgatccaaatgtgcaaagagccaagtattccataactgccattagccattctcaaaagtgtatttcctacctagttattgcataccaaagctctttcctaatgtaaagtgatttctgatacccccaaaagtaaaaaacatcagataacgcaatgcgaaacacaagacagccttagattttgagagggatctatccatttccaattcctgggatttcatgaggaaaacagatgttttttctcaaaatggggtctgtggtgctcctttttttcccaaggagtcccaggctgttagaacttaaatatctgcttttaattaagctgacttttaatggtactgctgtttttaaaaagtcctcttaaatttcttattacctgactttagccaggcgaaactgtcaataattctggcttttgaactttatcaaaggtaacctcccaggtgttcagagaaaggaaaattcaagacagaccattgaggggaagagaatcaacaaatgttcatgcgcatatcaaaccagaaaggactcattccctaagctgggaattgaaccctgaacctgggtcaccattgtgaaaagaaagcctcagctactgagctactcactgggcagtttccattgctcttcccagaaggagtctagagcagcagattttgagcttgcaaaggttttaaatgctcaagataattttgtagagctaactatgacatgaacccccaaattcctgttttctggatggtagagacctagagaaagtaccgccatgtggtcacaaggtcaagctcccaaggacataactagccagtttgctgggccgtcttgaacagtaggcttatggggtcctaagcttgtgttctatcctaaggtacccctctttctaacagaaatatacaggaagacaaattcacagtgcaaagtacaacagattcactgtagcttaaaactagcctcacaaatcctttttcacattaatcagaactttacagaggagataaacagtgatttttaccattctttgaactagtttgcacagagagaaagagagaggacagaagtctcactggtaagaaattcttacccttttgctggcatgccaggcttctgggttccctttccctgagcagtcctagtgacccagcttgacgcatcatagccctgggggccaagctgcaacacaaaggaaaattgtctttttttctgtcctggccagagcaaaatatgtgtgacatagacattagccactctgctcagcatccaatatcaaactaacaaggctcaaatttgcccctggttggaccctgtcatcattaatccaacctctgaccagaagtttcaacatgtggtctctgggcaagatggtcaccctgagtaagagaaaaggtaagaaagggaaaggagagaaagaaagaaaagcattggctgcatacagcagggtggggaaggcaaaataatcaaggataccagagaaagaccctcccattgcgcaaaagttcaggctgccgcttgaagggatctgtcatgaagggatcttttccagtagtcccattagctctcaaacatcccccttttgggaggaaaaagctccccaagtcccacattcacatgcatgcctaattatgtcacccacagccatcagcaaagagggcaaggcagattaacccaacgagaatagcagttaatatctcgtattgccaaacccattattagctgagagggactttactgagaggggcctgaaaccccctaaatcttaggaaggactctaaccttcttaagttgggccttgaatccatgttctgtcaagtgtccttgtcttttattaagaggggcctttaaccacctctgtcttaagagagactctaacgcccctaaattaggcctctaacccatttccatcctttacccaagcaaatgtaccccacttacccagagtcagccaataagtgctgaagtctatttcctttgggtcaggggagtctcctccgtgttgtcccttccatggttcaccagaaagatgttaccagaaagaggtccagatccagaccccaagagatacattaaaacaaagcaagttttccttttgaacttgtcaaaaattccatcttgtaaaggatattaaatgttgctttaagctgaaccttgagcaaattaggtggtttgtgtgaccatacatgtatgtggtggcttcttgtttgcaacttcaaggaacaagtattaatagttcagtgtatgatgttgatttgagttgagcatttgcagtttggataatcttaaattttgacagacactagctgtggagactctttctgttactaaatccttttgttttgaagctattgccattcgtctttctcttgtcctttatattttttgtctgtttctttaagcttttattggaaatgtgcataagtaaagaattacttgtgttacttgccaagcaatgcacatttcatagttttaaatctgtaatcagcaataaaaatcctaaaatatgtatctaagaacatcttaaaaaattctttctcactcaagaaagaattcaaggtgagtccatagagtaaagtgaaaccaagtttattaagaaagtaaaggaataaagaatggctactccgtgtagagcagcacccccaatgtctaaaaatcttaacaatgataataaaagcagaaaacatatggtaattttttggcataaaacccttactgcagtgagcattaaaaacaaataaactgctttggttcttcattctagagacatcatatttaaaaacttagatttcattatttgattttcattttgttacaaaataaaatattcttagtgtcacactaaacagagatcagataattaacctgaccccatgatgcataattttaattttaatttcaatttgagttcttaatagaaataatgaaaggctgttatcatattttggttgaatggacacagatctatttttttatggtaccacattgagaatttgtttttttacatatataaatctattaatggtattgtcaaaatactgtcttttttttttttttttaagatgtagtattgctttgtcgcccaggctggagtgcagtggcatgatcgtatcctagtgcagtctcaagtaatcctcctgtcatagcctactgcatagctgggagtacaggtgcacaccaccatgcctggctaatttttttttttttttttttgtagagatggttcttactatgttgtccagtccagtttgaagcaatcctcctacctcagccacccaaagcataggcatgaaccatcaagcccagctagtcttttaagctttgttgttttgaaaataatgaggattattactttgatatcatattagaattttttctaaaaatttaacaagaaattatctttagttctgtataatctgtgggcagctatatctatttataagcatctatgccaattattactttacttctagttgtaatttaaatttgttttagttttcaaggacacagctagtcttaataacttgatttgtttttatttccatttattgagtttagcatttataataacttaaaaaaaattttatttcactttaagttctgggatacttgtgcataacgtgaaagtttgttacataggtatatgcgtgccatggtgatttgctgcacctatcaacctgtcatctaggttttaagccccacatgccttaactgtttgtcctgatgctctctctcccctccccacacctgaaaggccctggtgtgtattgttcccctcccttcgtccatgtgttctcattgttcagctcccatttatgagtgagaacatgtggtgtttggttttctgtttctgtgttagtttgctaaggatgatggcttccagcttcatcagagtttctgcaaaagacatgatcttattcctttttatggctgcatagttttccttggtgtatatataccacattctctttatccagtctatcattgatgagaatttgggttggttccatgtctttgctattgtaaatagtgctgcagtaaacatatgtgtgcatgtgtctttctagtagaataatttatattcctttgggtatatgcccattaatgggattgctgggtcaaatagtatttctggttctgggtctttggggaatcaccacactgttttccataatggttcaactaatttacattcccaccaacagtgtaaaagtgttcctgtttctccacagtctcactagcgtgttgtttcttgactttttaataattgccactctgactgaaatgagatagtatctcatggttttgatttgcatttctctaatgatcagtgatgttaagctttttaaaaatgtttgttgactgcattaatgtcttcttttgagaagtgtctgttcatatcctttgcccactttttgatggggttgttttcttcttgtacatttgtttaagttccttgcagattctggatattagacctttgtcaggtggatgggttgcgaaaattttctcccattctgtaggttgcctactcaccctgatgatagtttcttctgttgtacaaaagctctttagtttaattagatcccatttggcaatttttgcttttgttgcaattgcttttggcatttttgacatgaaatctttgcctatgcctatgtcctgaatggtatcgcctaggttttcttctagggttttaatgattttgggttttgcaattaagtctttaatccatcttgagtcaatttttgtgtaaggtgtaaggaaaggttccagtttcagtattctgcataaggctagccagttttcccagcaccatttataaaatagggaatcttttccccattgcttgtttttgtacagcttgtcaaagatcagatggttgtagaagtgtggtgttatttctgaggtctctgacctgttccattggtctatatgtctgttttggtaccagtaccatgctgttttggttactgtagacttgtagtatagtttgaagacaggtagcatgatgcctccagctacgttctttttgcttaggattgtcttggctatatggactctttgttatttccatatgaaatttaaattagttttttctaattctgtgaagaaagtcaatggtagtttgatgggaataggactgaatctataaattactttgcgtggtgtggccattttcatgttattgattcttcctatccatgacgatggaatgtttttccatttgtttatttcttctcttatttccttgagcagtggtttgtagttctccttgaggagctccttcacgtcccttgttagctgtattcctaggtattttactctctttgtagcaattgtgaatgggagttcattcatgatttggttctctgcttgtctatttttggtgtatagaaatgcttgtgatctttgcacattgattttgtatcctgagactttgctgaagtcgtttatcagcttaaggaattttggggctgaaacaatggcgttttctaaatatagaatcatgtcgcctgcaaacagagacaatttgacttcctctcttcctgtttgaataccctttatttctttctcttgcctgattgccctggccagaacttccaatactatcttgaataggaatgatgaaagaagggatccttgtcttgtgccagttttcaaagggaatgcttccagcttttgcccattcagtataatattggctgtgggtttgtcataaatagctcttattattttgagatatgttccatcaatacctagtttattgagagttttaacaagaaggggtgttgaattttattgaagcccttttctacatctatcgagatgatcacgtgattttgtcattggttctgtttatgtgatagattacgtttattgattgtgtatgttgaaccacccttgcatcccagggatgaagccagcttggtcgtggtggataaggatatgctgctggatttggtttgtcagtattttattgaggattttcgtattagtgttcatcagggatgttggcctgaagttttccttcttttttttttttttgtcatgtctctgccaggttttttgtatcaggatgatgctggcctcataaaatgagttagggaggaattcctcgttttcaattttttggaatagtttcaaaaggaatggtaccagctcctctttgtacctctggtagaattcagctgtgaatctgtctagtcctgtgctttttttggttggtaggctattaattactgcctcaatttcagaactcattattcgtctattcagggattcgacttttcctggtttagccttgggaaggtttatgtgtccaggaatttatccatttcttctagattttctagtttatttgtgtagaggtatctatactattctctgatggtagtttgtatttctgtggggtcagtggtgttatcccctttgtcattttttatgtgtctatttgattcttctctcttttcttctttattagtctagctagcagtctattttgtttgtttgtttgtttgttttcaaaaaaaacagctcctggattcattgattttttgaagggtttttcgtgtctctctctccttcagttctgctctgatcttagttgtttcttgtcttttcctagatttttttatttgtttgctcttgcttctctagttcttttaattgtgacactagagtgtcaattcgagatctttctagctttctgatatgggtatttagtgctataaatttccctcttaacactgccttagctgtgttccagagattctggtatgttgtttctttgctctcattagtttcaaagaacttcttgatgtctgctttaatttcattatttacccaggagtcgttcaggagtaggttgttcaatttccatgtagttgtgtggttttgagtgagttttttaatcttaactctaatttgattgcattgtggtctgagaaactgttataatttcagttcttttgcatttgctgaggagtgtttactaataactttttaaaatatcagtgatttttccaggtaatagacatttatggctttgaaatttcaaagtatgtttaaacaaaaaaattcatcaacaacctcctcccacattctgcatttacatttatcattatcatgtgtgttcttatacttttattattagattgaaaaatatacaattgccattcttatagattaaaaatggtcaaacattggctatttcaaatagttcaatatgtaagtatctcaaaataatataacacatgctgttatctttatgttgttagtatttatgtaagtgctcatatatatatatgcacatatataaaaatacagagtatatcttcaatttgcctttttcataaataatttttctgagaattacccattttgatattttgttcattcattttagtttctctattagtattccactttataaaaaaaagtatggattatgtatttgtttccatgtggagagttagcttttctctttatataatttatagaagattgcaattaatattttgtatgtctccttgtgtgcatttgtgagaatttgcacagaaaaagcacagtgaaaggtatcataggcttcttaagtattcttatcttccattttgatatatcgccaaactgttatctaaagtggttgaaccaatttgccttcctatggcaacaggtaaaatacccatttgcctgtgttatcaacatgttttgttttccaacatttttgccaaaatcatgagtataaaatactcccttattttcgttttaattttaatttctttagtaactattaaaatattgaaacatatggcatttgagttttcgcctctgtgaattgcttgttctggtatatctttcattaaattttccattgcatttccttgtcagtaaaagttacacttataatctgcattttacatgttttaattatattgattgtaaaaatatttccttcagtggtttgacttttaaaattttttgtatttttggtctgtcacacaagagttttaaattttaacattggcgaatatatcagttactttttatggttcagatagttttatatcttacttaagaaattctcttttatcatgatatatattgccttctattttttctgaaattaatttttgtataatgtgtgaggtagagatttaattttaacttatctttattggcacattcttgtcccactgatttttattgaacacacattatttcctcactgatttttaaagccacctctactgtatctcaagctccaatttgatggtagtgtgtttaacatcttgtttcagaggtcaatttgattaacttcttgccaaaagctatagcacttgattatcttttgatatcttgcagtggattccttcttaccagccttcttcagctattgttaggtcttactcctccaaatgaattttaggatcagtttatataaaaatgtttattgagattttttattggaattgaattaaatttatacaacagcttagggataatttatattgttatgctgatttttttcatccatgatcatagtatatcattctatttatttagatcttcttttatgtcttttagtaaatttctataaataaaatactcataacttataataaaagggataaatataaaatttattcctaggtatctcaaggttttggtgctattgtaaatagtatcttttattaaattgcattttatatttattgctgatataaagaaatattataaattgttatatatcattcttatttccaacaccattttggaacacattaattcgaatatttgactatagatttatttgaattgttgaggtagaaaaccatgtaatttgcaaataatatatttatgtcattctaattcttatggattttacttcttttctttgtctgattgtgaggtctagacattcctttaacaatcttggaaaaaaaagcagtgagagcaagcatcctcaacttgtcattgctttaatggaaatggctttacattttttcctttaaataagatgtttgccatatcacgttaaaaactttcccacctattcctaattgtttagggttttctacttgtatattatgtatttttcaagacatggcagatttaatttgttgagatataattttcatgcctatgctaccaagtgagattggtcctgtcgttttcctttctcttaatgtccttgagaacatgtttcagctctcccatttatgacctgttttaccttgggcaaatttcttaatatctatatgcttcagtttcctcatctttaaaattagcatcaaaagaatatctttccatagtgtttttatgaggattaaataaaataatatacataaagcacacagaacagggcctgctactcagtatgcaatagttattagctgtcattgtcatcattaatattaagatattttaaaacacttttcccctaaaatacttagagtactttgatgcatatcctaagatctgtctctggctgctatttctggacatttctttgttgtaatatttctggtagctcttacttgtgactgtgaattgtagacatttgatgcccacagactattcagctctttcaacttctaccttgttcctaaggaaatctgaatcaattcatcagggtctttcctaaagaaatttgtcgaagttatccaatccaatgccacgattatatttcttcttgtatgattgtgtttttgttgtttgtcaaagaaatttttgcccaagtcaaggtcacaaagaattttcctgtaattttttctagctatattatagttttaggttagttctattatccatattgagttaaacttttacataaggtgcatgatatgttttcaggtgctttaaaaaacataagatatccaatattccaggaccgttcttggaaagaagagtattctttttccatttaattttctttgccacttagttaaaatacagtggactgtgtatgattttattatcagcattttcattgctactgaaatgcagtaggtatgcaattgattttcatgtattgatattgcaacttgcaactttgctgaactcatttataattcctaatagattttagtagatttcttagagttttctatgtacaagagatagttttacttctactttttcaatatggaaagatttatttcttctgcttgcctatttgccctgtctggtaactacagaaaaatgttgactagaagtggcaaaagtggacattgttatcttgttcctgatcttagggaaaaagcattttttcaccactaaatatgatgttagctgttggtttttcacagataccctttattagatgaggaagttgtcttctttaatagttagttgctttttaaaaattttatcatgaagtgttaactttgactatgtagctattaagatgatcatgacgtttttgtcctttatttttccaagtttgtgtattacttgattacttttcgtacattgaaccagccttgcatccttgtgataattccacttgctcatgatgtatgatcctttttgttagtactgtatttggttcactagaattttgttgaagacttttgcatctgtattcataaggcatattggcctatagttttcttttgatgtctttgatgtttttggtattagggtaatactggtttcatagagtaatttggagagtgtttcttcctcttctattttttggaagggcttgtgaagtaatggtgctacttcttctttaaatgtttggtagaattcgccaatgaaagcatctggtcctaagcttttctttgtggaaatttttaaaaaattactaatttgatctcttttagtggtatagatctattcagattgctaatttcttcttaagtcagtttacatagtttgtgtgtttcttggaatttgtctattttatctaggttgtctaatttttggcatacagttgttcatagtatcccttatgatccttttttgtgactgcaaagtcagttgtaatttcccttttttaattcctgattttaatcattagagtcatctcttttcttggctagtctagttgaatgtttgtcaaatttgttaataatttctaacaatcaacttttgttgtttttcttgttgtttttctattctctattttatttgtctgctcaaatctttataatttcctttcttctgctagctttaggttgagtttgtttttctttttctagtttcttaaggtagaagattaggttattgatttaataaatttctctttaaatataagtgtttacagctctaaatatcactttaaacactacttaaatcccataaagtgtgatatgttgcatgttcacttccattaatctcaaaggatttttaaatctttttgtaatttcttctttgatcattagttattaggaatgggttaattttcacacatttgttaattttacaaatttgcttctgttattgatttctaattttttctattgtgatccaagaatatactttgcatgatctcagttattttaaatttatagagacttgttttatggcctaacatataatctatcctggagaatgtaccatatgcacttgagaagagtttgtattctgttgttgttgggtggagtgttctgttggtgtctattaagtctaattggtttataaagtcattcaggtcttccatttctgtttgtattctgtgtagttgctctctccatgattgaaagtaggatattgaagtctccactattgttgttaaatggtgaatttttctctttaaatctttaaatttgtcattttactgttgttagacacatacatgattataattgttttattttcctgatggattgatatcttaaaatattcttgtctctactaaaaattttgtctaaagtctattttgtctgatgttagcataggagctcaagctctcttttggttattgtttacgtggtgtatctttcttttcattcttgaacattcaatctatttgtttcctcgaatgtagagtttgtctcttgcagaactcctatagggggtcatgtttgtttgtttttccattttgtaaatatctactttttgattgaagtgcttaagccatttacatttagcacagtgactgataaggtagttacaatgtcactttgctgttggttttttaaaatatgatttatgtcttctaaatttctctattctttcactgtcttctttgggttaaaaagttatcttctagtgtataatttaatacccttgtcatttattctactatgtttgttgcccaggatgttatcattaacatcttaattcataaaaatctaattcaaattaataccaacttaattttaagagtatgcaaaattttgcacctatatagtttttgttcactctgctttcttttgtgccgttattgtctatggagattttttacattggatgcccatcaacacagatatataattattgctttataaagtcatcttttaaaacaaatgtgagagagaaaaagaattacagtaaaaatacatttataatctttttaaatatttacctatttaattacctttacaggtactctttatttcttcatctggattacattgctctctaatatcctatcatatcagccagaaggacttcttttggtatttcttgtagagcaagtctgatagtgataaaacctctcaatatttctttatctggaaatgtcaatttatcctgcatttttgaaggagagttttgctagaaaaaatagtttttggtgtacagtttttttttacgactttaaatatgtcattcttctcccttctggacgccatggtttcttcacaagaaatctgtggttaatcttattgaagatcccatgtaggagatggccttttctcacttgctgctttcaagattttctctttgtctttgtctttcaacagtttgatttttaatgtgcctagggtgtggatctatttgaatttatcccacttgcagttcattgagcttcttggatgcatagattaatagttttcatcaaattttggaagtttttggtaattatttctctaaatattctttcagtccttttacctcttctctgaaactcccattatgcctatgctggtactcttgatggcgtcccacagctttctggggctttgttaatttctcaacattctttctctttctattgctcacactgaataatctcaattgacctgtattcaagttcattaattatttcttctgatcatttagatctgctagtgagctcctctagtgaatttttcatttgaaagttttctattttctatttattttttctttttttgatgaaatgaggtctcactacgtttcccagggtggtctcaaactgctgggctcgtgatcctcccacctcagcctcccaaagtgctgggattacaggcatgagccaccatgcctggctaaaaattttctatttcttttctcatattctatattgtctaaagcatcattgtcatactttgctttagttctttggacactttgttttgttttgtttttagttatttgaacatatataaaatagttgatttaaagtctttgtctggtaagtttaatgtatgagcttacaattgacccatttccattgcccatttttcttcccctgtatattgtttgtaggagtttctttgcatatgccatattctttgttgaaaaccagacattttaaacacatagtgtagcaaatctggaaatcagattatttccctttccagagttgttttgttgctgctatttgtcactattactactgtttgcttgtttagtggctttcctgagctaattctgtgaagtctgtttctttgtcatatgtgataaatgaagtcattgtttgctcatcttagtagtcaggcaatgactgaacagagaatttcttaaatgcctagaaccaatacattttccagtctctggtgagagatctgtacgcatgttgcagaatgccatcaacactgaggcagtttaacactctcctttagtccccacttcctgcttgtgcagagcctcaaagtcgagctgaggtgagaccttaggactttctcaggtctttctttagcatgcgcatatacctgagcacatacttagccttttgcatgttcataatcttgtagattcgcaggcattttttaaggatttgcaaagcgtttatggacatgatgtttcacatcttctccttttaagtattttggattgtttgttgtttcttctgactgttgttactgcctgggtcaactgcaatgttaagcagttgccagtgattatttttagcaaataattgttttaaacaaacagagtaaatgctgtttccagtggatgaactctgagtcaattcaagccttactagtggggctttccatggtacttccaggcagatcgaataatgacaatcatctgaggatagagctttgaaacagctccactcccattctgatcctctagcagtaactaggctgctggttttcaccctgattgcaaactgttcattttcagggcttccagagagtggcagagaggagtacgggaataggaaagctaaaatgccatagaacatgttgttcttaccaatattcagtcatttaaaaaataaacactgtccacattgttgcaagtctttgctttatttccagagttctcaataagttgatgtgatattctttgccagtgttcccattgcttttatggaagacagactcttccattgttttcactctgccattgctgatgtccttttattcgtttcctcaatgtcttatagtttttacctatatacattgccttgctttaatagatttataactaatatttcacattttcagtgctaataaaatagtatttaaaagttttaatttccattggttaatcactagtatatagaaattaaattattactcatttaacttctatcaaacaaaattaactaattcacttgttatttctaatagcttttatgtacagtcatggaaattttctgagtagataattatgctatctgcaaatgagagtttatttctttccttctgattgttgtgacatttgttacttagccttattatctgtttttaccctgatttatatgttggattacttagttttcccatttgactaattttgttgtgccacccagttgtaatgcataacaacttctttccagtcatcacctgtctattttctgactagacagctatgaggtctttcttgtatgagtcatgtctatttccttgatcaatttatataatttagacatatctttgccatatgaatatttttcaaagaagaatttttatggaatgtttatcccaatgaatatctgttgttaaaaaattggcaagtagcaaaggaataagtaaaatttatttctatggctgtccttgaaatatttgatagtattctcacctcaaatcataattcttttatttgggatggatgattcacattaactctaggtctttagaaaacttgctgtaactcttttttatgaagaatttcttcaaatatgaattctttagcaatggatatgattgcaagctccaaaatttaaaactaaaatggtttttaaaggttataaaacccagcccctttattttatagataataaaatagatttcattatccccctgcagcagagcttccctttagctattattaaaatatagggagtgaattctaatttatcagcattgaaaggtacacctccacttctaataccctggtctgactgccaacatttttcacacatatgactgtaatatcctcctaactggcctcttggcttctactcttatcttcctatattctagtctcagaacttttgaataatcctgagatcacatcactcctcttctcaaaaccctccaatggcttcccattttactcagaccagaaatcaaatttcttacagtaggctattagactttgtatatataacaatttgtacctccatcctcccctctcccccagccagctacttgtctgacctaaccttctaataacctccccccttttattctgctccaggatgctagctccttgcacctcctctaacatgccaagcatactgatttagaggtctatgtgcttattaatgcctgcctggaacattttgcccctagatatacgtatgactcattcccattcccctgtcaatgccacattctcaatgaggcctctcttggacataacatccccactaaaatctagccatgctctccaacctgctctaatccttctgtttttcataaaatgtattgcattctaatatactatatgaatttctcattcattatgtttatctacgtgaatgcaagctccataaaagcaagggtattttgttgttgttgttaactgattgtacttttggcactcgtgaaagtgcctggcacataataggcttccaataaatacttgtgaatgaatcaatacgtaaaagaatgaagccaccctgacatttaaagccatggttcaggctttagcaacatcacagtgttcatcagttttgctgtctttcagttatggtaagtctttcaaaattatgaatggctagcccctgtttgttatgatctgggttctttgagataaaacacttccctagaggttatataaaatattttagacaatattttatcctgagaaagcaaattggataacatgaaatgcaggtaatttctttttttctccttgatatctcattatgttggcaaaaataggaaatgaagactgtcagttttccacggctgccatgcaaaagtactgcaaactgggtggcttctcccagaaagagaatgcctaggactatagcggggcacagaaagttccccacaaggagtatttcaaagctgagacattaggggctgtatgaggcagaaaaattggaagcagaggcaaaatgggaaccttagggctgagagagcctgaaggttgtggggcattaaaaattcatgctgtagattaacagtgtggggtgtaaaggatgctaggagaggaagaactgagcatggttagggatagttgaaggtaaagaaaaaacgggacacaggcccagcttccttgacaacattatctcttacctcataaataaaatttatgctatgaggagtgactttcctattcgtctttcctattccccaaataaaagcataggcacacaatggctttgctgtatttgcatgtattcttctcatctttcttctaagaatgacatgtccatctttctaccattccctctttgtttaactttagatcctggatccaggtcaattgatcataaatcatgttgcctggatggccaattaactgaaagaatattttaccatgttttcttatttcttgtaactaattataaattttagaacaatttgtgttggaaatcttctaaagatttctgcaaagttttagtagatttagttttgtcttcataacaccacttggaggaataattctttgcacttgtgccagctgcctgttttaggatagatagagtagagaaactctccctacgggaaagtcagagcaggaggctgcctagagcacatcttcttgtgggcctcagctcatggggtatgtggaagactgagactaatgggtagaaagagagagcctataagtgtatttttcttagactacatcagctgagaatacactaatgaagaaatatttttatatgtaatattttggttattttctcaaatatattatttaatataaatataacatgtaaatatatgaatatacacaaatatatgcatacacacactcacacacagacacatactctttttaggctcctaagtctcacactttgcttgtgagtttcttcctgattctgagatcactatctcagactacttcgtgtgctaattctcctctccatgttttatttatcagccatatcctcactctgtcccagtttcctccaagcaaccaccaaggagcagcagaaaacataaatcaaacattctttaaaactctatcaagacagagtgaaaactgaatagttaaaagaaaaaacacattgggaaaatggtcatttgatgattaaaattgctccaattttatttttttagaactattgaaataaacaattattgaaataaattttgttattaaaaatataacaaaaaacttggagtcggtagtttttctgctttattctgtctccactctcttgggcttatttgtctcagtaagttctgaaaaaatatttgccaaacaaataaaataataccatgtggattaaggttgatagctacatttgccttgaaaggtcacctaattcaaagtagattggtctttgaacctggttttcttagaagattttccctgaggcaataaaattctgagagtgaactatgatactattgatatatgtgaatgacacagaacctacaagtaggaagtcttcgatgagtcctcatttggagattttctagaacagacattaatttaactttagagagaacccaaacagatagcctggagcttggagctataacaggtgggatgtgagagtgaggaatcttccttttggcattgcaaatactctggaaattgcaatcagaagcagatgacaatcaaatttagggctgatgagataatatatctatggagttataaactagagagaaatttgacttgggaagggacttctggagaaagccatgagttcgatcagtaaataggctggccaaagtattcactttgacttaagtcctacagtgtccatggagataactatgattatttttgttattaatgtggaattagcaaactagagattgatctgtaaaagtttcaaagggcagtgacataaatatctttttaaccttaacatcttcaaaggaatatcacttaaatacttgtcaggtattgcttggtaaacagagacttcttatattatgcacatgtgtgtatttgcaggtttagagcagtttgtcggaagaatgcaagattttcgattataccaagtggcacttacaaacaggtaagcagatgttgcattgtaaacctcaagaaccgaaaggataaatgctgaattcacttaaataagaatactatgtagattataccattttttatctttataccatttggcaaacttcacctaattaatgtttacagtgtttgctttggcttagtctatggttgttattcactagtgctactcttgaggaactccttgtaatatgaaattgatcacatttttcctaaggatattctgtaagaaaacttgatatttgaacattttataaaacttgggatacaatgcttaaattttctatatgaggtagtttctattaacaatacttgagaaacttctacatctgccttttttaaattggtttgttgactttatacctactagagaatgtagaacaataaacgtgattaattattttgatacatgggaaattctcaagagactgatctattagacttggagacaagaagaatgagcatttgaagtattgtgatatatttttctattttcagtgaacaaataattatatagactcaggctagctttaatgacattatttccttatcttgagagtagatgggaaatctttcttagggcttcttaaaagcacacagaattttaaaaaatttaagtgaaattctgcttaggatgcctttgaactttcttcttcagcttatgatatcatggtataatagtatattgttgtatggatgagttgatcttatttacttctattaaaaatcaaaaagaagaatgttcattcatatttcttcaaggcagatataaattagtgtggtgggtttccaaatgagaagactagcccttgtaaatttagaagcattgcttttgatgtggttcttagtccatggcagatcattaacaatataaacattctttcttaccaggctatataatcaaggtatgcctcagtaaagggtgccatggccctggaacacagtgttaggtgtatttactgccaaaagccttactatattttagatcacctttgtctaaaatgctgaagggcaatgttgtagtaattctttgggaataaagtttttccttgggagtgaaagattttatactggattctatactggtagcttttggtcccattcaaaacttggtatcagttgaaaagaattgatgagatttaaagaaggtatgacttcatgtgatttaatgaatggaaaagctgcctgactccttcactgctccactggggtctgagaggaaaagcctggtttctctggtaagaccttgattactaattttggcctacctgaaatgtctgggaaggtgctatgtggaagaatgcctataaatagaatgactaattctggtctagaacaagtatattgcccctaatggaaaaattaaatatatctacctggaattggcattctttgactgttggcagccgccatatgatctgaagccaatgaagcattacaggatgtcaggatctgtactgatgagtcacaggaaaccattgacaaatggccttggcctcagtccttcacttaaaacagaagcagataaaatgatacttgctttcgtacttctttcccatggatgaactgaaaacattatctataactctcattgttctccatatattattgttcactctcagtagttagtttagcatcctaagtaaatgtgatcatttctatattatcacaaatagacacggtaaaatattgtggtatttaaataagtatcttaataatcagacaagggcttatgcatgcttcttgatataaataaaaagttaatattaaaatgtgtgggttttgatatacattttatgataatgaatttgtttatttggccaaaaataagttttattttatgtttcatgcatcaaattattaaaactaaatggatactcatgaaagcactaaacgagtgacattcatttgtaacgactcctagaagttctattactgttaagctctttgtccttacagtctccctcttgactcccacagagagattctggaagtcttctctggagatcttctcagattgcatgcccaatcacattgccgttgccctggcagccacccgcgggtccaccctttggcacagcggtactgcattcctaatgatgcaggagacacagctgataatagagtgtcacggttgaatcctgaagcccatcctctctcttttgtcaatgataatgatgttggtacttcatgggtttcaaatgtgtttacaaacattacacagcttaatcaaggagtgactatttcagttgatttggaaaatggacagtatcaggtaatgagaaacgataaggtgtacattaatttcctgtggttattgcaacaaatgcccacaaacttcatgtcttaaaacaacagaaatatattccctaacagttctggagatcagaaatatgaaatcaacatgttggcagggctacattcccttaaagattccagaggaggatccctccttgccatttgcagctcctggtggcccttggtgttacttggcttgtggcaccacaacttcaatctctgcctccattttcacatggtgtccttccttgtttctctgtgagcatcaattatcccttttctttctcttatataaggcccaccctattagacccaggatgatctcatattgacatccttaattatactgcaaagaccctatttacaaataaagtcacatttacaggtttggacagtagtacttggacatatctatttgggaacacaattcaacccactacaaggtgaaaactgaactaggcaattgaaccttgcctcaataaagtagtgtattataatgtatacaataaaaatatctaaaagacaacatgtaggaccttatgtttgagatttgtatcaaaatgatatttatgaaatgttgaaaataattatttttattaagtagcaaaaattaatacaaactaaggtgctttttctaaattaagaagtctctatatatgacatttatttcatagaagtaatgttctttgtttatgtctttatttgcatgttgatttataaaatccttgagcaaatgaacagatacacaattatagaatatgttgcttttaccacagggctatgaagtttctggatgtctaatacatatttgataactataattatgatgaagtgagccaatatatttgaatctaataattccatggtttgatatatactgatggttaaacttaaaactttaattacattaattaactttccattttcaggtgttttatattatcattcagttctttagtccacaaccaacggaaataaggattcaaaggaagaaggaaaatagtttagattgggaggactggcaatattttgccaggaattgtggtgcttttggaatgaaaaacaatggagatttggaaaaacctgattctgtcaactgtcttcagctttccaagtatgaatatttttaaacaattaatttaatagactgattggttattaataatgtacaagtatgctagctctctaggctggtggagacttcccttcaccaccaacttccttgaggcagattctcctaagtcttatccctaaattgggcttaaaactatgtttaaagttcttgtaaaagacattagagtgactcttatttcaatctcactgatgtttcacaatctgattttcagattgtttggcaagttatctatgtaaatagaattttcattatgttttcaaggaactgttttagtgtggctttctatgataatcctgtattgtttatatatgaaatatatggaatatgcttttcctagaatgaataatttaagcttttattgatactgtgtagtaatttctcaacattttgatttctgttttgccaaaaatgtgaatagattttcatgacatcgaatttctttcattaacagttttactccatattcccgtggcaatgtcacatttagcatcctgacacctggaccaaattatcgtcctggatacaataacttctataataccccatctcttcaagagttcgtaaaagccacgcaaataaggtttcattttcatgggcagtactatacaactgagactgctgttaacctcagacacagatattatgcagtggacgaaatcaccattagtgggaggtattattatgaattttgttttcaacaaggtttttgtcatacttactgtcttaacagcacattaagatgtcagagcaagccagatttcaagctttacattttgaaatgatttcatactctaagattttaggggaagatctgtatgtgagtcttttctctatataacattgttatatatatatatatatatatatataaaacgtattttataaataaatatatatatatttatatatacaggaattgattttcaaaagctgttgcttttagaagctatgatactctgaatctgacttagaagtgatttatccaatattttacttgatttgttctggaatataattttcaaatattctcaaaagcaaagagatggagctgaatttggagttgtaactatagcaccagagagtttttaagtacagatcttgatctacctgagttcatagtgcacagttccatgggtaatacttgtttttctttagtggaaagatctgatatgccctaagtagtttataaatgtctgatcataattgagaacatgactcacaatatttaaaaagaaatgacagctgcaaacctaggcagcatactgtctaatatagaaatgtacatatagagtatatttagaatggattgttctggaggaatgataggccttgtgaataaaatatgtctttaaaagcagaccaaaataccagtatataagcattgtttgtttgctaagtcatagcataatgaacaaagcaatactattaaatattcatcatctaactttggaaaaaaaaataaaaaaattgaaatatgttaactgcattctgcagtttattgtcaactttatattcttttttctttcttttttttttttttttgacaggcttttgctctgtcacccaggctggcatgcaatggcatgatcatggctcgttgcaacctcgacttctgggcctcaagtgatcctctcatctcagcctccaaagtaactgggactacaggcatgtgccaccatgcccagctgattttttttttcactttttgtagagatggggttttgccatgttgctcaggctgctctcaaactcctgacctcaagtgatctacccgcctgagtctcccaacatgctgagattacaggcgtgagccaccgtgctcagcctgaactttatattcttaactgtattttaaatagtgtagtaaatgccttcccttggtacgtggttggtatagatataaaaaattccatttccctttagaggttggcttgaaaattatctttacaatacacgggtttggatattggtgacagtccttctgacatttccagataaattaaaaacgtgtatggatatccacacgattaaggagaaactgattttgtatcaattaaatatacaaaaatcttccctgttaaattcacataatgcatatagtcctaggaccttaaatatattcacagttgagttggtgttccttaggagtgtgtgatgctcatgtttgcagatgtcagtgccatggtcatgccgataactgcgacacaacaagccagccatatagatgcctctgctcccaggagagcttcactgaaggacttcatgtgagttctattttatgcatggaaatctaaaaaaaaaatagtagagatggtgactataaattctatgaacttaatcttggcctaacaaatgaaaataaatttaaaaactgatatgaacttaaaatgtcaattattgcagattttttaagaaaaataacagccatcaattaagttgaaattgtagtttttaaaaataatttcagccagagaaattacaactgaaaccaaaccctaaggttcttttctcttttgtttttctttctttgtttcatcagcattatcatgttttataaaacaatttttaatgtgtttggatagcatggcactaaacaaaaaatagtttgattcttactaaagggtatttatacaaaagtatcaataaacaaaagcatcgttagatgaagaacaatgtttatgtatttatgtcaatcaaggttcatttattgctaatatcaggcattttaattaattgaaaatctatagtaaaatgatttatgagttatgttactttagttttctgtgacgatcaggggaattccatagttgaggtggaattttagcttcatctttagggaaaagaggtaagtggaaataaaatcaagaaacattcgttggtaggaatatctagcaacaacatcagaaatagctgatatgaaagacggttcagcagcagtaacaattataccaataatgagagtagataatatagactcttcagtaaatatgtttaagacaactggctgctaatttgcaagaaaataaaattagagctctactgattgtatgtacaaaaatgtatgtggcttaaacttttagtgaaaaataactataaatatattaaaataaagattagaattctatatcttaagttgagggcttttatcagctaagcaaatgaaatacaaacagaaacaaacatctggagctatgaaggaaattaatgacatattctgttatataaatatttaaaattctacacagtataagggttaacataaatgtaaggtagtgataaatgatggattgatagaaaatatttgcatcatgttaacaggtaaagagttaagattcctaacacacaaacatttacaaaatattaagaaaaatataacagtctgataaaaatgagcaaatatatgaacaagcaatttacaaatgaacaaattgtaactttaataaacatataaaagattacccaacctcagttttaatcatattcaacaattgtttttaacatttcaaattagcagaaaatataaagattggtaatatttagtacttgtgggaatataacctttaacacatcactgatgggattgccaattgacacaatagttttggggaaaatttgtccacctctactaaaattaaattttcaaatatagtgaactacattatataattgctgtcattctgaaaagcagttcttcaatgacaagtgtatggaatggtgtattagtctgtttgcattgctgtacaggaagacctgagactaggtaaatataaagaaaagaggtttatttggcttgtggtactgcaggctatacaagcttggtgccagcatctgcttggtttctggtgaggcctcagaaagcttacaatcatggcagaaggcaaagccagaagccagcctcttttaaacagccgtgtctaaacagccatgaactaacagagtgaggtctcactgctgaagggaaggcacttcatgaaggatccacctccataacccaaacatctcccaccaggctcacctccaacactggggatcacatttcaacatgagatttggaggggacaaacatacaaactatataaaatgcttatatttctatcattttgttacataaatatgggcttatatgttagtgcattttagcttttcagatggtagcactgtctcatacactcatgtatgacttgtgaacatctctgcctcttggaccttgccctacacttgtgttttagttagttacttcacttctctgtgaaatttattttaggatattatagagcatcttgctttttaaaaaaccatctgtaaaggttttggcaaattccatttctgtcttctgattcttactctgatctaatttgcttttgactgtaacattagtgagaatagttcaatggtaagaatattatctataatgcagactttctctagcacattcaaaacgtagtcccactcctcagtttcaactaagagtctttgatttagttatggcctactttctttctttctttctatgtgctcagaccaaaactttcatgttctaatttagatattcttttgaatttattttctagatcactactttatatacatctagtcctcaccattagtcaatacttgctttaaaagaagaaatcttttatggttttcttttggatttctaatgcctagagtctttgcatttgatttcattagtatattatgaggaaaaatcttttagaagaactgattttaatatgcttgattgtatggcttatcatattgtcacagaaatgaaattaattggattaacttgattgatttattcttcactgagccataattgtgtgtttaaatttttgccaattttatttgttctagattttaaagttaaagcaacatttattatatttttctactgtcttcttttgatcccttaagatggacacttacttccttataatcagtgatttctttcattaaccttgtcctctcctccacaaagccactaacaccccaattaaaaaatgctttgggatgaatttagcagggcaccttgaactgaatatgtctagtatttgcaagctacagtttggctaataccttcatatgatatgttcttttctgagcttctcttgctttctgttgactagtcagtcggtattagtctctctcatttgcttgtgacgtcctgtcttgttttatctttctgtctttaattgctcacagttaagtgttggatattttctgattcttggatgatttcatgcttccccttaaaaatagagccattaaatgaatgaaggctcatgattggtttcagaagacaagttgggattttcagacttggtctcaggtggtgaatgttggattatgaactagtgaattaattaactataatttgggttgagaatacattttaatgcttcttatttagaccttaagtaccttttgaaaacaaaaatgaaaaactaaactttttttgttattttcctccttgacatattttgatagtttatgaatttagccataaattttaaaaagcaacaaatataatttacttagcaaactttggcaaatgcaaatgcagctgcagggaaaaagtcaatagactgttaagttgaatgatttctcagtcctatgatattttcaataatgtgttgaaaatgaaaaatgattttatagaaacattcataggcatgacattctcctttgttaccattcaaagtattttaatacaagtagagacttacatatctgagaaaagtcgtcttacggtaatttgaaaatatacctattctaatgcttttcttgttgttctactttttaaaattatacgttttaatataagccattcacttcctattgggatccatgttctttttaagacctggacataatccaaaaagaatgtcttcaattccacagtgttatgctatccattaataatattacttaataaacagggcttttgtgaattatattacagacatttggcaaacagatgaaaatgtaaggactgaaaatatgccaattcttggcaattgtctttcctatgagaaagtgtttttagtagaaacaaaaatgaatgaagttgagaaaaggtgaatggtgaattcaggggcaggttcacatatttagccatcctaaggaattttccgtacaaaatactattcatttgtttataaggtcaatgtcacaaattggtggctcacaggtagaaacagtgtttaaacagttttaatttaattttctgcaagagttttcactttaaaatatttatttattcttcaatcttttttatttatttatttttttgagagggagtctcactctgtcaccgaggctggagtgcagtggcatgatcttggctcactgcaacctcagcctctcagcttcaagcaattcttctgcctcagtctcccaagtagctgggactacagctgcacaccaccacacgcggctaactttttgtatttttttttttgtagagatgggtttcaccttgttggccaggcaggtcttgaactcctgacctcaagtgctccacctgcctcggactcccaaagtgctgggattacaggcatgagccaccactcctggccctcaacttttattttaagttcagaggaacatgtgtaggatgtgcaggtttgttacttaggtaaaggtgtgccatggtggcttgttgcatagatcatcccctcacctaggtattaagtccagaaaccattagctattcctcctgatgctcttccccccacagcccccaccatccctaagaggccccaatgtgtgttgttccccgacatgtgtccatgtgttctcataattcggatcccacttgtaagtgagaatacgtaatgtttgattttttgtaccggcattattttgctgagaataatgacttccaactctattcatgtccctgcaaatgatttatatttctggtaatacacagtaatgggattgctgggtcaaatggtatttctgcctctagatctttgaggaatttccacactgtcttccacaatggttgaactatttatactcccaccaacagtgtaaaggtgttcccttttctccacaaccttggagcttctgcacagcaaaagaaactatggtcagagtgaacagacaacctatagaaggggagaatatttttgcattctatccatctgacaaaggtataatatccagagtctagaaggaacttaaacaaatttacaagaagaaaacaaccccattaaaaactgggcaaagaaccctgagttagcgagttgttgccaggggaggacattaatgtcttcttttgagaactgtctgttcatgttcattgcccaatttttaatggggttgtttgtttgagaacagttctcaaaagaagacatatgtgtggccaacaaacgtatgaaaaaaagctcagcatcactgatcattagagaaatgcatatcaaaaccacaatgagataccagctcatgccagtcagaatggcgattattaaaagttaaaaaatgacacaaatttttaattcctcacttctcttaatcagaacatagtctaacactgtgtccatttcctgccatcaacaactcactgattcagggtgacatttaccacatttacaacagtatcactcttgggcttgctacaacattcactactatgtatatccttatacatgggcgacatcactttggtgaactacctggccttgaaagactcggagcttcttaacctcctaaagcaaaactgatggatagattgagacactagaagctagaatacatttttaattattctgagtagagaaagaccagctgttcattgctatattcattgttaactcctatttcttttacccctttataaaaataaaaactcacaaataaccgaaaacaactcaagaaaatctattagcaaagacactgtttactctgagatgaaattaaagccatgcttactttttttttaattacatttttgacatctaaaaacatttaccttggggagcctcactgattctcctctgcactctttgaccaggaactccgatacatttttgtattgtactggcaattttaaggccttgactttaatgtatgatacataccataaatacttcactcatagagaatacttttagaatacttgtcgcatttctttccaagaatgaaaaaaaagcagtaaatgcttaatttactaggctcactttagaactgatttagggtgaaacaaatccaaaagcctagatgctattcattaactttcatacaaagttaaatatttcaaagtagaaattagaaatacatggtattgaacttgcatgaatcattatatatctcacaagttacaaacatgttatttataaatgtttaatttcatttgaataaaaaatagccactgttacttgcatttttaagtaaacttttaattttgagataattatagatttatatacagttgtaaaaaataatataaagacaatttgtgtactctaccaatttgtcccatggtaacatctggcaaaactagtgtttttttctttttacatcaaaagtgtgatttgtgtacaataaaatatacccacttaaaaatatatagtttgatgagttttggcatatgtgtaccctgtgtaatcaccatccctgtctagagatggaatgtttcactctcccaaacgttctcttatgcttctttgcagtcagtgctgtctctgaacccccaatcccaggaaaccaccaatcttatttctatcaatacagattagttttgcctgttccaaaatttcttagcatagtgttatttggtatgtaatattttcgtacataggcttttaaatcccacctcacccccacttttagatcattccctaattacatgtgctgttagctttactgcaacatggtatctctggcccacttaatcagaaatccattataagtatcaaagtgtatatattaagctcataggtacataatacaagctaggaattggaagcctgggtttatctgtcaactaacatatttgcaaagctataatatatttattacttctttttcttatctagtactttctttacttgatctaagagttcaagtgttgaatagaatctagttttaagaaaagtgttgtcagttgaaacttgaatccttatgagttgtctttttcctttaataactacatttacctttcggggctctggccaagagtgatgcaatgatcagtgtctcagccaagcattggcacttcattggctacttagctattctttcgtcattttgtgacatcattacctgcaagggtagccaagccttcacagagcaatttattagtaaccatgaacacttcttattctttggctctaacttatgacccttttataacattaatcatagatcttatgaattaactacaatcaaactatcagtataaatttttgttagcattataaatagcacagccagcttgaaactttttatataataagccttcctaccactcaataatttgaatggtgccaacatcacactctagaatgcttattatataaatgaatatttctgttatttttgaaagattcctttagagcaccaaagtccaaaagtatgaatcatcatgactaatttgtgtcatatttatattatatatcaggctttaccactgcttattttttctctgtttgttcgcagattttaccctaaatatattttatttatattttaattattgtaatgctagtaaattaattcatttttatataactagcattcacacagttcatattataggatctacatttgatatatgtttagtaagtcaaggtaaagaattttctttcctcactgacatgatgatattattaatctttgaaaaacacttgtactagttctttccgtgagataggtatgtgcataaatgcttttaaaatataagttgaaaacatgaaaaagaggttatgagcatggagataaattaagacagccttacagaagaagcaaatagagatagtgaaagtataaacatagtaaaagaaaagataatatttgaagggataagagtaaagaattatctaaaggtgaggaatgacatgatttttctgaatcccaagtaggctaagaaaagtaaatgcatacataggtataatataatgaatccaataatcaccaaagaccaagcagccagaaagacagaaatctgataatcaccaaagacagaacagcatcctaaaaacagccagagagaaaaatacaaagtgtaagaaattaatttctaagacactactgatatatttctcaacagccacaatgaaagccagaagacagcagagtagtgcctttgaaatgcagagagaaggcaaccaagaaatatggaattgtatttgtagtagtaccatcaattagaaacaagaaagaaagaatgcatttttagtttacagatatatatatcaatattatcaccagcagactctcaataaaagaatttttcgagaatacttttcataaggatatataatgtttccagaaaataggcctggtgtgaaggaaggaattgtgagcaagtaaaccagcaaatatgtggataaatatagaggaaaatttactgcgttaaataaaaataaggttatatgtaagaaagagtataaaaagtagcaggataccattaaatggtcattaaaaatagcatttaaagggaaggggtaaactccaacttcagctccctctagccattctgttgcaccttggggtaagaagagcagttactgagaaatacttgtaaagttcacagccaatgagcacagggctcattaaaaactgaaaactaatcctagaatcatagaacaggggtccccaacccctgggccactggtcagtagtggtctgtggtctattagaaaccggactgcatagtaggacgtgagcagctggtgagctatcattacttcctgagctctgcctcctgtcagatcagcagtgacatgaagttgtcataggagcataaaccccattgtgaactgtacatgtgagggatttaggttgtgcactccttctgagaattcctgatgctttgaggtggaataccttcatcttgaaaccattccccatgtgctgccctcacacccagttcgtggaaaagttgtcttccacaaaaccgatccctggtgccaaaaatattggggaccactgccatagaacgctttccctcccctctcatcttaccaccacaccatgaaaggcctgtttgccagagttccctttactcagtacatcatgtctggatttcaacaaaaagttacaaagcacactaaaacaccaaaaacaaacaaacaaagaaacaaacaaacaacctcacagtttgaagagagagagcaaaaatgagaatgagactcagacatggaaaggatatggaaattatcagaccagaaacttaaagcggctctgatgaatacactaaaggctctaatggaaaaagtagacaacatgcaaaaatagatggcaatataagctgaaagataaaaattctgacaaagaagcaaaaagaaaagctagagatcagaaacactttcatagaaataaagaatgcctttaattggatcattaatatttggggacagctgataaaagaatctgagtttgaagatgtgtcaatagagactaccaaaatagaaaggtaaaaagaaaaatgactgaacaaatagagcagaatatctaagaactgtgagacagctaccaaaaatgtaaatacatataatggggaagaagaagaagaagagaaaggaacagaagaaatatttggaacaataatgactaagaatttttcatattccaaatgcagaaaaatcaaagttagggaaaaatatcttaaaaggagcctggctgaagggggaacatctagcctatgaaaaagcaaagataagaattacattctacttctcctcagaaagcatgcaagcaagaaaagtggttaaatagttaggtgttgacagaaaaaaaaaaatccacctagaattctgtatcttgcaaaattatcctttaaaagtaaaggaaaaatactttctcaaacaaaaaccagtagacttttcttgccttgcaagaatgttaaaggaagaacttcagagagagagaaaaaatgatacaggtcagaaaactcagatttatgtaaagaaagggagaacattagagaaagaataaataaaataacttttatttttcttatccttaattgatctagtagataccagtttgttcaaaattataataagaacaatgtatttcattattatagcatgtgtgtaagtgaaatgaatgatagcaacaatacaagacaccagagggaggaactaggaatactttattattattaggtactcatgccaccttttaagtggtatcgtgttatttaaaagtcaacttggaactctcgcatgacattattttgtcttgatagttcaagctccacctgcggttctcccgtcctccatgccaggtgtcaggggctgctctggatgttaactcttccgccccatgacttccagttccaaaatggcggcacagaaacaagctgccatgccacaaccccaccgcgcccctctcccgccaaaaagaaaaattaacaaatatacattgctgagattatcaccagaaattgtcacgatagtccagaactcaaatatgaagatataactgttcccagggccataaggaaatgagaaacaccaagtggatggtaagaaacctgactttcacatttgtagcactcgttaccccattttgcctgacaccaaatatgcagaagattttcctccaactcacttttttctacactggaaaaattaagattgaggtaaacaaccagcttccccagccattctgggttaccggaaagagacctgtcctatccatgcctcaacccactggaagcgtcatgagtgcctaaagggagacatattcctgaagataggcagagacaaagggggatgtaggtctgtcatccccagcctgggaaagtctgctctgtaacttgaccaatgcagacacaatgtcagagtagctgcttagcagcactatgatgcaggaggattatttcactgttctcctcggcacaaacccttaggcagccttcccatactgtcaggatattccctttgggacctctcttgttaagaagggcacaattggattgtttactgaagccaaggcgaacctgggcttaaagcgccccctatagctccctagaggaagcaatttagcagcaaagacatagatgtatgtccacaagaaaaacagcagtaggaaactatgatgtctccaaacagacaaagcagggaaccagggactggccctaacaagacagtaatatgtaagctccctgaccacgaattttaaaatgcagttttaagaaaactcagtgatctccagtagaacacagaaaaataattcagaaattcattagagaaatttaacagagattgaaattttaaaaaatctatcagaaaccttggaactgagaaataaatttaccgaactgaaaaattcactagtagctctcaccatcagaatggattgagcagaggaaagaatcagtgagcttgaagacagaatatttgaaaatatatggtcgaggagaaaaaaagaacacaaagaaatgaagatttcctacaatatatagaaaattattaatacctcaaaaggccaaatgtaagaattaatggtattcaagagggagttgaagaggaaggattagaaatcttattcaacaaaataataacaaaaaattccaaaatttaaaagtatacttggattagttataaatgtatattataagctttatagggcaacccccaaaaaagttttaaaaaggtatagttgatatatttaatacttacaaaggaaagaaaatggaaccatgtaaaaatgctcaactaaaaccacaaaaggtaaaaagtatatagaaaacaagaatagaaacaaagaacaagggcaatgaataaaaagtagtagatattaatccaactatgccagtaactactttgagtgtcaatggtctaaatataccaattaaaagagagagattgttagaatgaattgaagaataaaaccagctcattttataatgccaacattaccctgtaccaacatcagacaaagaaattacaagaaaagaaaaccacagaccaataactctcataaaaatagatgcaaaaattctcaacaaaatattcaaaataaaactattaagcaatgtgtaaaaataattatatatcagaaccaagagggatttatctcaggtttgcaagactggttcagcattcaaaaatcagctaaagtaattcctcacatcaacaggctaaaggggaaaaattacaagattatatcaataaatgtagaaaaagtatttgacaaaatcaagcatccattcatgatcaaaactctccacaaataaggagtagaggagaacatactcaacttaatagaaaatatgtataaaaacctagagtgaacatcatacttaaggataagaaaccagaatctttcctactaagatcaggaataagacaagaatgtttcctctcagcactccttttcaacaacgtattaggaaggaataaaaacaacaacctcatttcaaaataaggcagtaaaggagaacgaaagaaaaaggatatatagaaaatagaaattccaaataaataaacaatcacaacaaatctaaatgtgctgaacatattagaattatgagactgtctggctgaaagagaaaacaacatccacctattgtctgagcagaggctgaattagggcaagagaatgtcttaatcacaaactttacaaaagcaccaaaaacaccctattaagcaagatctataatatttttatgttatatttcaaaaagtcaaatgatttagaaatgtataattaaaaatcaaaattttaagtaaagacacattagtgttgcttgttttatggtcctgtgttattttgtaatgggagctgttgtttctaatcagtccataattcctacctaccagttttataaggttggcatgtacctgtctcatagaaggttttacaatcgtctagaaacagactaggcatgatgggacattatacacagctatttttttaaaactgtagagtgtttattaactttttccatttggctccaaagattggtaaatattttctagttgtatacagaggttcgtatttttcctttgccctcatgctgcaatgcagctcagcatggtacttgtgctgagggtgtgagagacatactcaaaaaacaagcacacttcaagtttgaaaatttaagaaagctagcatgagctacataaatattaggcaaaacagacattactgtttcattaaagaaaaagaggcttattgtataattataaagtataaaattctaagtttacatgcatctcataatatagtttcaaaagtataaagcagaattttatagaaccagaaagagaaattggcaagttctaccatcagcatagaagaatttaatacatctcttattaaaaatgtctttttataaaaagaaagaaaagctacatactagcagttgtcattagcaagacaacacatatataactgacaaaggtaacatttaaattaagcaaactatttgaaaaacagacaaaagaagtgaacaagtaattcacagaagaagccagaagtggcaactgaaatggtcaatatacatgtaaagacatgtgcaactttactggttatcagtaaactaaaaaaaaagaatgtgataatattttatactcatcaagttgtcaaagatggcaaaatctggaaatttcaggaactggtaagtggggactcatacaccacttatgggaaggtgctgctgcactatggaaaacaatttgcaaatgtctacgtggaacactttacagtagtggatatgaaggaatatagctatcacatcaacatgaccagacttctcaaacaatcatactacagaaagcttgttttagaataatacatacactgtatacacttatataaattttaaaatcatacaaatagaaagaagaaactgataaaaggataggaggcaggactaacttgcagctccccctcggacagacagagcagcatgtgaagacacacatcatgaacttttctccaagaactactgcagcaacataccaggaaagccacgagaatccacagatcctttgaaggaaatagattgctgctgcaggctccaggagacagccgaaaaactgtaagtgcccaaagtgtgaaagggggatcttccacccctgaacacatagccttcctggggaacctgaaggtccaggtcacaggtgatggatttggccttacctggagctgagacaaacttagagagctgaacaaaatataagggtaaaggaagcagggggaagagccctgtggactctctcagcccccaggaaaaccatttctgactttgtctcctagggtccttgggtaggactgccagtggaagtggggaaagaccacaaggagaaggaaacttccagatgaactctgtaacaatttcgactgaatgccaactttcctagcagaatctgggggtgagggtgaactgggagtgcagacacagcacagaagttgcatcaggcagggaggtgtgaaacctgaaacccctgcttgcttttccagtggggagacctggagcaggggcaagtcctcagccctgttcacccattgcctggaaataaactcagtgctgttgtggagagtattgtgggagtgagactggccttttgggttgcatgggagctgggtgaggcctttcactgccagctttcccctactttcctggtgacctgtatgatgtagcagaggcagccataatccccctagaaacataactccatcgccctgagaaccacacccccaacactcagagcagcttcagcaaggcctgcccaaggagagtctaagctcagacacacctaaccctgaccctacctgatggcctttctctacctgccctcgtagccagacaaaggacataatctcttgagagctctatggccctgaccaccgcctgagaaacttatccaggagactctagagcaagcttgtatcctccctatgctactgccgttgatgctctcttgaaagcgccacctcctgtctgaaggccaaccaacacaaaactagtgcaataaacaaaaatacaacaaaggaccctcacagagtctacttcactcccctgctatctccaccagagcaggtgctggtatccagggctaagagacctgaagactgatcatatcacagggctgtttgcagttactccccactaccagtctggaggctgctagctccactgggtggctagatccagaagagaaacaacaatcactgcagttcagctctcaggaaggcacatcctggagcacccacatccagggagcacccacatctagggaacacccacatctggggagcaccctgtgggaagaaagaatctgaacaacagcacttgagccccagatcttccctctgacatagtctaaccaaatgaaaagcaacctgaaaaacagttctagtaatatgacaaaacaaggttctttattatccccaaaagatcacaatagcttaccagcaatggatctaaaccaagaagaaaactctgaattcccagaaaaagaactcagaaggttgattattaagtgactgaaggaggcaccaaaggtgaatatgaactcaaaggaatttcaaaaatgttacaggatatgaacagaaaaatctccagataaataaatagcataaataagaagcaatcataatttctggaaattaaggacacacttagaaaaatgcaaaatacactggaaagtcttagcaatagaatccaacaagtagaaggaagaacaccagagcttgaagacaaggcttttgaattaacccaatcaaacaaagacaaagaaaaaaaaaaattaaatgaacaaggcctccaagaagtttgggattatgttaaacgaccaaatctaagaataattggtgttcccaaggaagaagagaaatctaaacgtttggaaaatctatttgagggaataatcaaggaaaacgtccccaaccttgctagagatctagatatccaaatacaagaagctgaaagaacacctgggaaattcatcacaaaaaggtcattgccaaggcacatagtcatcaagttatctaaagtcaagatgaaggaaggaatcttaagagctgtgaggcaaaagcatcaggtaacctatgaaggaaaacctgtcagattaacagcagatttctcagcagaaaccctgcaagctagaaggaattggtgtcctatccttatcctccttaaacaaaacagttattggccaggaattttgtatccagtgaaattaagcttcctaaatgaaggaaaaatacagtctttttccgacaaacaaatgtttagagaacttatcaccaccaagctagcactacaagaactgctaaaagcagctctaaattttgaaacaaatccttgaaatacaccagaatacaacctccttaaagcataaatctcacaggacctataaaaaaaaaacacaatttaaaaaaaagcattcaggcaacaaatagcatgatgaatagaaaggcatctcacatcctaacactaacattgaatgtaaatggcctaaatgcaccacttaaaagatacagaatggcagaaaggataagaactcaccaagcaagtatctgctgtcctcaagagactcatctaacacataaggactcacataaacttaaggtaaagaggtggaaaaagatattccacgaaaatggacaccaaaagcaaacagcagtagctattcttatatcagacaaaacaaacttcaaagcaacagcagttaacaaagagggacattatataatgataaaaggactagtccaacagggaaacatcacaattctaaatatatatgcacctaactccagagctcccagatttagaaaacaattactactaaacctaagaaatgagataaacagcaacacaataatggtgggggacttcagtactccactgacagcactagacagatcatcaagacagaaagtcaacaaagaaacagtggacttaaactatgacttagaacaaatgtacttaacagatatttacagaacattctacccaacaactgcagaatatacattattcatcagcaggtgaaacatcctccaagatacaccatgtgataggccacaaaacaagtctcaatacatttaagaaaactgaaattatatcaagtactctctcagaccaccgtgaaataaaattggaaatcgactcaaaaaggaaccctcaaaaccatgcaaatacatagaaattaaataacctgcttctcaatgattcttgggtcaacaatgaaatcaagatggaaattaaaaaagtcctttaactgaattgtttgatatagtgacacaacctatcaaaacctccatgatacagcaaaggtggtgctaacaggaaagttcatagcattaaatgcctatatcaaaaagtctgaaagagcacaaatagacaatctaaggtcacacctcaaggaactagagaaacaaaaaccaaacccactcttattgacttaataaggaaattaaaaaaagtatgctgagattgctaagatctattataataatgaatcttctatctgtgaaatagtgaaaaaaaaagaaattagtgctagatttgctgtcaaaccacaaagtgcaaaagttacggccgcagtgctagataagtgcctagttcagattgaaaaagcattaaatttgtgactggaagacatgaacagaaaatatgtactatatggaaccaaaatatgtactacatagtacacatagtaccaaacccagttgctgtcacttggcacatagagatctggcatctactggaggtcttcaaatgtattccttgtggaaaacaggactacttactatactactaaattcagatattattagcggagtggaatatatatggcagtatcttgtttctaagttgagtggtacataaaatggtacaattctttttttaattattcataaatttatttttaatatttcagtataatttcccttaaacacaataatatgattgattaatctatcaggaatgtatcacctatgtaaatactcatgctactactaaagacagagtggaggtgactctattcacaatggaataaccattactaaattcatgattactgtgtacatttatagttttactgtaaagattgatcatttgctagctttagtcactcaacaaatatttataaatgccttctatgtgtagtgcattatgctagagtacagccattatgtcttgattacagatgcaagtatttgaaaatattgaaggaccttcatttgtgaaattcaaaaaagattccctggcagacaccaattactataataaatagagatgacttcagtgcaaacaaatgattcaggctaacaattagtaattaacaaataatataaatagtatagacattttaaatcttaaagaaaaatttaaatgcagcaatacttaagaaagggttttttaatttactaatgtagtaatcaagtctaatactacaaaaaatttctaatatgaaataccctttatatttaaataatcaaataccttgtataccagttgactaagtttagaggaatcttaaatattaaaaaacatcaataacgccttatacttcttagtatgtgaattcgtatttgtatgatgtatattattttggagagttgcctgtaagcaccatattaatataatgaatgaagcttttcttcattgaagtcctttgtaaaataatgcaggttatcctgaataaatatggtctctattccaggccatatttcctggaatatcaatagggttaaattattatggttgcaataaaatagaattgctttatcttgtccactatctacaatcttgaataaactttaaaatcctccttctgttctcttaagggaacgtggtgtgtccccatgtgtcttttttatttagtgccctgaacaatccataaataagaggaagaaggaataaagaaggacagagatttcaaaggagaaatcaaatacctaacaacatgcagtattgaaaattaacaaataagaatgcaaggcctctcatgcaaatggttccatctcattcaaccactagacataattacttctgtattcacaaggcctacagtaaggaaatactgtttaaaaaaataggctatcaattatatttatatatagacaacatgtagactgaaggattatccgaataatcctgcctagagtttctgtttttctaaatataggttttatgtcacgtattacaatttgtttcattggataattttccaatcttccatttcactttacccatagaattagactaggcattacttgaattagaatgtttctaaaaatagccacttatattaatagttgaaatattgaagtaactatgtatgatgtgtttgtcgtcattgtattgtcacctatgtttgatcagtattgtccaacagtattagtagttatttattttatgctattaatttcagtatctagagagtgagtaagtacattgtatctgtgaacactttaattatgtaagaatttctagccaagggaaagataattactgaaaaagggatatgtcattgaaggataaacacgtggcatttctgtcttctcagtggtaaagaatagtatttgttttggcttttccaattgaaattacataatctgtaggtaaaaattcacaggtgaagtattattgcatttgcctttaaacctttaatgttactattcaattaaatgctagtcacattaaagtacagtcctgtaatgtgtcataaatgcaatgagtctgttaggacattcactcacacattcaccaaatatatatgatcacctcccatgtgcaaagcacagagccattttctgtctagattctctatgtagttgggcactttatctgtgttcccctctgaaatctatcactgataataaattaacaagtttgtctaacattacctttgccatgggaacattagagctacctagggacacttccattggaaaaaagatacctgagtacactaaagtttttatgtttataaagatgatttctctacctagtagacaaatcacagtgaaactggatcctttgaattaccatggaattgctccagccagaggaaaggggaagccttgaatagagccggaggacaattactattattagagatttaggctcttaacatttccaacatagggggctggtttctactgatgagaaagggaaaatgtacagattttcagagggtctgcaattcattcaggccatctgggaatagttaaaaaaattacctcttttattcagtgagcagtactgtaacagtactaaaaagtgatcattttataatctttcactttgaagcagattgtctttctctccttctcacataggcagtgctgcatccatatctctaaattttatagccaggagtggaataactacatcttttggtttctagggctttgctgtccagtttagactcagcagaaagtaaagatggactgagccagagtgactccagtcaacacctctctccctcgaatactattttcggtccctgaagccagtataaacatggagattagaagtgaggtctttgaaggaaaacatccagatatataaattgagtacctactatgttctagggctccttctaggcacttcttcaacatattgaagacaagttgttttcgatgactcattgtgatcattatgaacttaagcttccaaaggtcattgacactgggagctctcaggaccttgaagggaaattttctccctagcccccagccttttgcaaggacttcatatatctttgtctaagaggatatttttcttccttcttttttcaaagatacatagtaggcatttaagattgttgtataagtgactgaataaataaattgctcttgcagttaaattacttaaacttgtattttacacaagtttctactttctctgtaaatttgaaggtgttaagaaataagtaaaattgagtgtgtggcttgtcatggtggctcccgcctgtaatcccagaactttggtaggccgaggtgggcggatcacttgaagtcaggagtttgagacgagcctgggcaacaaggtgaaaccctgtctctaccaaaaaatacaaaaattagctgggcatggtgatgtgtgcctgtagtaccagatactcgggaggctgaggcatgagaatctcttgaacgtgggtggtggaggtttcagtgagcccagatagtgcctgggctccaacctgggcaacagagcaagactctgtcctttatctccaaaaaaaaaaaaaaaaaaacattgagtctatcaggagtggagttgataaaaatgctttggagactatgggttatctttgaaagattgtctttgctgctctgtaatggtaacgaagaaacactatacttcagtttaatgatccataagaaataactgtcattgtgtattattagaatataatgtaataaaataaatttcatcagtgtcttctagattcaatgactattcaatgattttcatacctgaacatgtcaaagtatttggctgcaacttagcggagttgattagtagcctttaagaagctatcaaaatgaaagcagttaaatgaatcagtggtaaaggtccttgaccctgatatagccattgtctaatctcataatttgggcattcagggacatatcgggggaatccagttgttacagaagaaaccgaaacataattgaaagtgacaaatgatcaactggagattgggaaaacatgaaatagaaaaccatttgcttcaggagctgcctaaaatataagatacacacagagttcttgattttaaatcaaactttaaaatcactggtagaaaaggcagttgaaaattatgagaattcaaaaatttacttataatgcacttaccaattattatttcttccattttgtcatggttatccttgtattatctgaaacgagttgttaagaaccaattatgggaccaagaatttaatacttcatgaaactttataatcaaagaatagactacaaagtattccttctgtctttgcaaaccatacaaaatgataatagaacagtatcatctttaggatcaaagacccaaataggcattggtgtgtcatttagttgcatatgtcttaaatcaaattttaaaacaaatttaggcatcatctctcaaaatctttgcttctgtatattaatcccattgttttggaaaaaatgtatattttttacaaatcatactctgtttactggtggctcaaaaactttttagcttacatagtagttgaaaagagaatcattttttctgcagatttttgctcatctgtgtgtaatttaaaactgaaacatattaattttcttaggttttcttagtgaaatgttacatgcaaatgatgtataattatcttgtaactatccatgcagttacattttatttgctctcaatttttaatacattagtaataaatgtacactgtggaaaaaataaagttataaactttatctgtaaacctaccacccaccggtaaccccagccaataatcttagtttatatactttcaggcattatattattgttattattagtaaacctgtctcatctgtctctatcttcttaaaattgcatatttatatctatagataagtccacctttatctagaatagaggattatactctgtatattatttttaacttgattttcaattcaagctgtattatgaatatatttctctatttatatttataaatgttagcctttttttttttaggaattggaacatcttaaaccactctcttgcttttgggcatttaatttgtttccttctcttcagtattatcaacaccccattattaaaacagaaaatctttatcaagcagctttaaaaacatattctcggacaggcacggtggctcacgcctgtaaacctagcactttgggaggccgaggcgggtggatcacgaggtcaggagatggagaccatcctggctaacatggtgaaaccccgtctctactaaaaatacaaaacaaattagccgggcgtggtggcaggtgcctgtagttccagctactcgggaggttgaggcaggagaatggtgtgaacctgggaggtggagcttgcagtgagccaagattgcgccactgcactccagcctgggcgacagagtgagactccgtctcaaaaaaaaaaaaaaagtattctcctaaattctcagtggaatttctgggtcctgtggaatgtatacatatgttgctcctcctaaaaggagtggataaactcctctcctacaagcagtgttctgcactggccctttctacaaattcctttcaccctggtattatcataatctaaaaaataataatttgagaatcaaaaaataacagctatgcttgttttcttcaggaaaacagaacaggttatccatatatctgcagggtttttttctccacaaaagaaaggccagccattttcaataacaagtagtttggcaggaccagaaccattccattgggtcactggtaaaatttgtctttggctttaaacattaaggcagccaggactgtgtctttggacattgatacagcatttagtccagtcttatttacaattaggctttttgataatggcttttgggctgacgttaagtataaaatctgaaattagattttttaaagattataatcaaaaagcaaaaatgtcttcctagaaatagcaaaggaatgcttttgctggatttgctccactaactcatgtaggcaatataccaaactcaaacagccagcagttgttttgtaaaagacaaactgcatctgaaatcagtatgacaggaccacagtttccatctcatcacttccaccaacttacatttaagaaagcacaacttgaataataaaaaccaccatagagtaaacaaattcttcaatgagaatgctttgaagtcaagagaaaaataggctcagggcattgtgttacagcaaaattttgcctttggcaaaagttttacgatggaatagggtttttaaaatattgggaatcaggtaaattgcatggctaattgaactggggaagacagcttaatgagctcatttctctccttcaaatccaagaagtcagaaggcaagttttcatctattctttcatttatccaattagaacatatcgtccccacacatagggctactagaagaagtaatagttatgtctgatggctcttaggaagtattgtcaatagataggacctcctctgtagttataactacagatgatcaaattaaccagaaataaattttggtcataaatttcttcttgctccactctgtaggctacctcctccaaagcagatcgtagaccagtgcatttataaatcacagaatcaccttttaatggttatagactatatatagcatagtgacagtcatatactgctggtgctggtcaaacttgagatcaacaattctgttggatttttacccctctcttccttctttttcctcctcttccatattctgactttcaggtttgagcatgtaataacttccaggatttgttttgggcattatttatatattaccacttatcctaagattattttgagtcagataaaagtaagacattctattaagttatcttcattttgaagatgaagaaactaagattcatagaagtaaagaggactctaggagtaactaactgtccattgtcattgttaatgttacttaacctctttaatcctctgtcgtgaatccaataacgatcaaagtagtaggcaagtttgctgagggccaactgtgtgacaagcactttgataactgattggtctttacagcaaccttatgagagaagtattattactctcatattatgagtgagaaaaataaggattaaagaggtacaggcaattactcaagaacacagggctagcaaatcaagaaacagaagttagatgtgagatattgtatcacccaggcctaaaagatgcaatgaaacaacccattttaaatgtttaatatagtaaccagagtatactctcatttgatgagagtatactcatcaaatgagagtatgcatttgatgttacttttcacagtggcctttttgcagttaggaaacagcagcaccaataatagaactaagctgtctgactcccagcctgtacctaaatctctaacttttgattttatgaaataaatttgatttgcagatgggcattgctggtgagggaaatgtaaagaggtcaatttccccactttaaatttttttggctaaagacccatagctgacaatattttaatggttgccacatattcttcttttatgaagtgagtttcattttatatttgtaagtggtttttattgcaaatcatcacctaacagtcaattctgaagactttccataaatgtcaccttgtttgtgaattgttctcattctgtctcctctctaaattccctcaagaacaactttctttggacattaatatcattattaattgtgaattgtcagctaacagcttagcaattgtctatcatgctcctaatgcatggatgatacagagaatataaagtcaataacttgtatttcctgaaagatacatatacagaagccaatcatttcagtagagtgacaggagcaagattgaggtattaatagagtactctgagagatgagaagcgggacaactaccttagcctaaaggtttgcaaatgattgtggggaaaaataatctttatcactccaaaaagaatattacagtgatattttaattgaccatagagtttaacttgaccattgtaaaatgaccaaaagggtgaattattttttaccaattattaaaaagtagcactacctgatataaacagtgtgacctaatgtttacattcttattattttttctcctttttgtctttttctctctccccagctaagtagaaaaaactcactttgttttcatgctaaaattttggaataccattaaacagcaacacactggacaactacattcttatgttttatcttctccctttaagattgttaaaggaagaaattgaactagtggggaaaagtaaatactggccaaaaaaaaatgcttttgactagtgtatgttccaatgatgattatgaaatatgtcaaactgttctaaaatactaaatatgtgttactatttattctgtattaaaatagaacaatagaataacctttgttgtcccaatatgaaaatagtttttaacaatgttaatataaaacaaagagcaaaggaccattatcttggataaacagagagacattactttacatggtttgactcccctgattcataatttaacatgtaactctggcatatgctgggcacttagggaagtcacattaagtatttcacagcaaatggagagtgagaaaaatgattttcagaaatcctggtatttacttattataaatcttgtcttgaatttattgtactttacatgaaatataatttgataaaatgtaattggtttcagtgtgtatgcaaaatgagaattttctgatcattcagatatcaaaattaactttataaatacaaatacatataattacctattaaaattctaaggtgtatttattttaataaaagtctttatcaaacctagataaatctcatttatgattataaatgtaaaactcctaaatttttttttacttggctttatttactattaatgatgttgggtttattaaaaaatgcaagcacagactccaattagcctactaacctattgtataatttatcaattcaataggtcaaacaattaaatcagaacatttaataaaattgacaatatttttttatttttttacaaaaatccatattggttgttttgaagtagcaatttcttcttcaaaatgataaaaattgtctatgtaaaatcaatagtcaatactataaaagctgcaacattatagacattttcattaaaatgagtaaaaagataattatgcctatcacactactataccatataaattaactattatgctgaaaattctggccaataaagtaggggaaggaaataaatataactgtatatttaaaattatgaactaaatcttcactgttttacaggcaaaggaaaattctaatatctgataaaatctttaaagtcaattaaaaaagagtatactaaagaaaaatgaataattttctcaaaaaggactatatctaaccaagaactaggtgaagattggcattactagtatccaaagacataaatactaaaacagtaattgacatattatctaaaatcaaaatagtgaagatataacaattatgggcagaacacaagaaaatggacattctcagatattgctggtgtgagtatgagtttaatttttctagaaggaatttgaccatatttaacaaaatctttaaaatgtttatactctttgataatgtaatttcatctcataattttcttaaggtaatacttagatatatatccactcccgatccccaaaataaaatggaaaaaaaaaaactaaatgtgtaatgattgcagaagggttgaatgttattttatgagaaatataagaaataatgcagcaaaatacatgatgtttaattatacaaaactatgtagtaatacaaaatatatgatttttaataacacaatacccatgtatattcataattttgaaaagaagaaatatatgcatatacaaatttgaaagaaattatctcatgttgacattttgacttatcatttgctagtcaaattaccagtgcttttaattttctacctcctgcctttgttttataaagaatatttttattatgtctatagttatactaaactcagttcagttgaattgttatttaaatctatggaaaaaattttgctttgtccataaattgtatttatattagaaagttaaaataattaattataaaacatatatccaggtttttttatttgttccagtacataacagacctattacataatttgagtaaattttgtcttacagttatacaggcagttctctccttacacaattctgatatgcatgaatatcagttatcatagtttagttaaatgctaacagtcctccaacaacgtaactcaagtgttgggtaacattgaatattactgtgagtaattacataaacaaacattgctgctggctctgcagtccacaaattaccacataaaataacagatgcacattgtgatcagtgaccgatcacgtttatttttttcagtatctgttggtgattgcgcactacacatttatcattcagtttatttatagaagagaagcgtgtggttgtgttgcctccttgtgagtgataaacccgagtgacactttacaaacacagatattcaaaaaagaagaggaattggacagcaaagaggaaagcactgcaaagaaagaaaatacttgaagtaaaattcagattgaacctaagtggagtcatagaagaaatagtcactactgaggtttgagagattctgaatacgtagccagagctacttagtgaaggtgaacttaacataagtgagggaagtgcttgccacaaatagggtgaagatgtcctggaggaagtgacacccaaacacttcacattagaggaattctcacaggtacttcacaacactaaaagcataaaagttaaaatgttggaagctgattcaaacttagaaaggagcgtgacaattcaccaaggcatagaaaagaagtggccgggtgcggtggctcacgcctgtaatcccagcactttgggcggccgaggtgggcagaacacgaggtcaggagatcgagaccatgctggctaacagggtgaaaccccgtctctactaaaaatacaaaaaattagccaagcgtggtggcgggcgcctgtagtctcagctacttgggaggctgaggcgggagaatcgcttgaacccgtgaggcggagcttgcagtgggcagagatcatgccactgcactccagcctggggaacagagtgagactccatctcaaaaaaaaaaaaaaaaaaaaagatgcttgtgttcagtgtgataagttataggtgagatgaaggcaagcactgttcaaagtacttttagtgagtattttacaaaggactaaaacaacttctccaagtttttaatgttttaaattacagagtactaaataaatggtcatttttactggtttatttctttacatttataaccagcattggagagttgttaacatgttgaagttttacaaagtcttagagctatcataacctttcctgttgattattaagatcactttgcatgtttgtaacacaaaggttaaacacttgaggggatagatgtcgcattttccaagatgtgatgattacacgttgtatctctttttcaaaacatcccatgtagcctataaatacatacacctactacgtacccacaaaaattaaaaattaagaaaaaaaaagatcattttccatggttcaagtttgcatggtcacttttacaattccaccctaccatgcccgtaaatatgctatttctgacttacgaaatatttttcaaataaaatcattgctgacttttaactcactgatatgtgctttacttctggtgaaaggcctaacatatcaataaaatgaaagaaaatcacagctttattttctttactgttctgatattttttgttctagtgtgatcgctgcttgcctctttataatgacaagcctttccgccaaggtgatcaagtttacgctttcaattgtaaaccttgtcaatgcaacagccattccaaaagctgccattacaacatctctgtagacccatttccttttgagcacttcagagggggaggaggagtttgtgatgattgtgagcataacactacaggtaagtagcaaataaattcctgagttggtttggaggcctgtgtgcttctatctacaatgcatattattttaaattatgttattgctatcttatttaaggatgtactttcatacctttaagtttgaaaatcaaagctagttcaccaaatcttcctatttccaaatcactaggtagttttcagaaatagcactctagtcttaaactatatcttttcaggaaaaggattttgttgttgttgttttgttttgttttgttttttaaagagttcacaccatttgactaaaccacaaccatatttagaataactcgggaatgcttactttgaacacatatccttaaagtaagtttccttttgtcccctttattgtcctttatgtctggattctcatgtggagatggcattcattcagatttggcatggacactggtagtctgagaatactctttttgaaaatactaattaaatggagacgatgataatcaaagtcctgttctaaaactacaaagcctttgactagtcattgaaaaataccatccttattttgaaaggcaagaaatggccaacatctgaatttgtgaaatataatagcatatatctgatgggtttcaaagtggtactcttaagcatgaatccatttatcggctgattattgataacttaaatatcacaagatcttgggtaggtgctggggacatgaagatgaataagacaatgaattttctgtctttgggttattgtacagtgggaaagacagactattgaaaggaatgattacaaagttgtctgatgattgctaagatagggcaaggacagtaggagttaaccagttgaaagattaggatggtgaactaaggcttacaattagggaaacattttgtgcagtggcctagaggagggagaaaaatgacacgtttgaaaaaccataagatgggcaaatggctggtggtaagagatattaggaaggaaggcaggacaatatcatagaggactctggagccatgataaagcctttggcttttatctaaggtcaaggagatgacacttaagggttttatatgggaaaggggcataatgagttacttgttattaaaagatacacctggttataaagtaaaaaatggattggagaaggttagagtggttggggaaaactagttagtgaggtgctgcaatagtccaggtgagaaataatgtcagaatacatttcagatggtacggatagagagaaatggatccaagagatatttaggataaaaaagtgagtgttttgtgagcagagtgtaggcaagggaaggaaggagagccaagactgatacctaacattacattctagcttgagcagtaggctcaacattggtgccagccattgagatagaaaatacaggaggattgagatgagggaggagatggcaagttctgttgtggatatgttcactcggtttctaagagacataggagaaactcctgggggcagttggaaacacagttctgaagctctttccttcaaggaaatcctctcatgatgctttagagaagatcagaatcacttacacatgttagtgacaactatgcttatcatggtttataaatgtgtattactcctggtattatttagttcagattcctcttacctcctagactgtaagagagctttgtgaaagagatgcaatgggtattgtgtatttagtttactactgtattacacagcacttagcacagtatttggtacatagtaatcacgcgataaatattcattaattcataaataaaagagagatttctggattggagatatggatttgggagtcaacagcatatgtaaatggaaatagtctagaaatattataaatcaatttaatttttaactagctcaatagccaatatctatcagaatatgagttttcatattattgattattgattatttctgtagtcttcaaatattggagaaatttcaatattttttgagcaaagtacatcatgtttaaagggggaattgatagtcttgagttctacttcagcttatttcaattatcttatacactagtcacgttcactttaaaaattccttgtagtttaggttttttattacataatatagcaaaggaaatttgtaattataaattataaactatgggaattacctgatatatctaatatgtcaggctattctagtatttagtatgaaaagtacttggtatctctaaatataatgaatttctatttcaatctttgaaatgaaaaataatggccactaacataatcatttgtttttaattgtgttaactacagaataataaattatattaagagaagtctcccattttacatgattgagttctagaaaaatatttccaatactacatacctgcttgcttcttactgtataagtatcatctaccacatatgtagaaatttctcctgctgtattgagtttagataaagtgcctggccccagatataaagttttaagtttaggagcaaactctttccaaatgtatgggcccctataaagcacagctttttagaagtgtggtattatataacagatgggagtttaatgaagtaaagcacagtttgtaacaggttcattgtttcatatgctctggatcactaaattggcaggtagagatgaaaggtgcattaaaacggacgttccgaaaattatagaattccctcaaaggaatacagtctttaattttgaattatgcagctgattttaatgaattagaagtcataatgcataacctttccctgatgcaggaaggaactgtgagctgtgcaaggattactttttccgacaagttggtgcagatccttcggccatagatgtttgcaaaccctgtgactgtgatacagttggcactagaaatggtagcattctttgtgatcaggtgagtttttctgagtatttaaggtaaaggattactctgtctgccagaaacttatttggatgttattccactagtagaattgaagactgcatttgccaggaaatcctctatgtgcatttgcatttcaaagagatggttgttcgtgtgcaactttgagtatggacatgaaatatagcactagttcggtggtcctttgcatataaaaaggcttattttagttttaattttacaaatgtcaaaaaatcgaagggtaggggttctaagtaaattggggtatatgtcttggaattattggtgaattaatattaatacatgatataaataaacaagaatagtttctccaaaaattccatagaagatcatatagcaaaagtcacttacacttagggccaaatggaaattatgatagcctcgcttctcaatttcttagtctaactttccctcttaaaagtacaatggattttttataattttaaaactttctgtttacttacatcacaaatatcgatgtctagcctacatgcacacagattctaactaacctcagttcatgtatcctacctcaagcaggaaaacaggcttcttattgaagctgaagtttttcctgttctgataatactaataagtgaaaattgtgaaaatcggtaaaggagaaatttactttgaagaatcaattcaatgattgtattaattttaaacagttatatactctgttatgaataaataaggctaggagcataaaccacaatccagttatagaatatttgttaaaaagttatattgtgaacataatacacacaagacaaaatatctttctcctataattttgagaattcattaaaaattgctttcccaaataaaagacaaatataaaccaagacaaaatatggattcaaagaccttcagagtaaccatcatgtgtcaataagggggcattacatgcttcattagaaagctgaagagtagaaaaattattaataaagacaatttctactatttttattttataatattgagggactattttctcagaaagtcatactacagttttccatatattaattagtaaactctgactgtatctttagattatatttcatttttacacatccaccctgagttttcagcatggctatcttttgcttatcattcaaatattgatatatcatattttgagatatctttgctgaccacccaattacaaaacattctcaagtctttcatatcaccatgttactctcattacaggctctgtaaaattaatttatttgtttacttttcttcttctctctttccaacataaacagaacagtttcgatcatataaaaagcccccaataagtatttgtcacataaatgttgaatgaataaagagagattatctgagcactgatcttatagttagattgttattttaaacggtcattacaataatctgagcattatgtaaattttcacttgcagaacagtttttctccctgaaaatctaaggtcaagagctttgttatatagtataggaagactgtaaactatagttttacctcccagaatctcagttacgtgtctaacctacacgagttacagtgcatcagatttgtctctccatttcaccattcagatctacaagaaattgaaacctgatttttctgaactcaaacttctatttcaagtccgttttatagggatgctagacaaccttgggtggttctgtgcttgtaaataattaacaactgactaagaaaaaaaaaaggccaccataatcaatttcaatctaccagtgagatgtcactgaacatggatttcagaagaaatgtacttaatctgctcttatgagccagtgcagtgtactccagcatactactggctctagatttctttcttaacatcttataaagtggagctaattattggatggaattatgaaagactgtaccatttataagcaggatattagctgtagatagtgttattttttaagttggagaaatttttctctattcctagtttttctgagagtggtttttatgaatggtgttgaattttgtcagctgctatttctgcatcaattattatgatcatgtgatctttttttctttagtttgttagtgaagtagaatacattggttgcctttcaaatgttgaaccagcattgcatccctggaataaaaccacctttgtgtgtgtctttgtgtgtaattcttttcatatattgttaaattttatttgctaaaattttgctaaggattttacatctgtattcataagaaatattgctctatggttttgtttttataaattgtgtttgtttcattttgttattaggataatactctcgtaaaatgaattataaaatcttccttcctgttgtttttctataagaaatgcagaactggtgttaattactctttaaagtttaccccattctaatacatagtattctagtaaatacagtaccccatgtattagtccatttttgtactgctgggaagaaatacccaagacagagtaagttgtaaagaaaaataggtttttatttatttatttatttatttatttagagacagagtctcgctctgtcacccaggctggagtgcagtggctcaatcttggctcactgccacctccacctctggggttcaagctattctcctgcctcggcctcctgaacagctaggattgcagatgctcaccaccatgcctggctaatttttttcttttttttgtatttttagtagagacagagtttcaccatgttggctagactggtgtcaaatcccacccacctcagcctcccaaagtgctaggattacaggcatgagccaccacacctggccagaagaatagatttaatggacttacaattctacgtggctgggaaggcctcacaatcatggctgaaagcaaaggagaagcaaaggcatgtcttacatggcagcaggcaagagagaagtgccgagtgaggaacagggaaagccccttttgaaaccatcagatttcatgagaactaattcactatcattagaacagaatgggggaaactgcccccatgattcaattatctccacctggttcctcccacaacacatggggattatgggaactacaattcaagatgagatttgggttgggacacagccaaactcacacttggcccctcccaaatctcatgttctcaccattcaaaacaaaatcatgcccttccaagagtcccccacagtgttaactcattccagcattaactcaaaagttcaagtccaaagtctcatctgaggcaaggcatgtcccttctgcctacaagcctgtaaaagcaaaagcaagttagttacttcctagatacaatagcggtacaggcaatgggtaactacacacattccaaataggagaaattggccaaagcaaagggcctacagtccccatgcaagtctgaaacccaatggggcagtcattaaacctcaaagttaccaaatgatctcctttgactccatatcttacatccagggcatgctgatgcaagaggtagctcccacagccttgggcagctcggcccctgtggctttgctgggtacagccctccttctggctcctttcacaggctggcattgagtgtctgtggcttttccaggcacacgatgcaaggtgttggtggatctaccattctgaggtctggaggatggtggcccccttctcacagattcaccaggcagtaccccagtggggactctgtgtggggggtctgaccccacatttcccttccacactaccttagcagaggtacttcattcattagggctctgcccctgcagcacatcctctgcctggacatccaggcatttccatacatcctctgaaagctaggcggaagttcccaaacctcaattcttgtcttctgcacacctgcaggcccaacaccatgtggaagctgccaaggcttggagctgccattctctgatgcaatagtctgagctgtatgttgatcccttttagccatagctggagcagttgggacacggcaccaagtccctagactgcacacagtgggggggccctgggcccatgggaccattttttcctcctaggcctccaggcctgtgatgggaggggtgatgagacatgtcctggagacactttcccccattgtcttggtgattaacatttggcttcttgttagttatgcaaatttctgcagccaacttgaatttctctccggaaaatgtgttttgcttttctactgcattgtcagcctgcaaatttttcaaacttttatgctctgcttcctctttaacacttactacttagacatttcttccactagataccctaaatcatctctttcaagttcaaagctctgcagatctccaggggaggggcaaaatgccaccagcctctttgcatagcaagaatgacctttactccagttccccacaagttacttatctccagctgagaccacctcagcctggcctttattgtccatatcactatcagcattttggtcaaagccattcaacaagtctccaggaagttccaaactttcccacatctttctgtcttctgagccctccaatctctttcaaactttcccacattttcctaccttcttctgagccctcccaactgttccagcctctgcctgttacccagtcccaaagttgcttccacttttttgggtgtctttacagcagcgccccactacccagtactgatttattgtattagtccattctcactcaactataagaacaaacctgagactgggtaatttataaaggaaggatgttaattgacttatagttcctcagggcgggggaggcctcagtaaacttacaatcatggcagaaggggaaacaaacacatccttcttcacatggtgacagcaaggagaagtgccaagtgagggtgggggaaagttccttataaaaccatcagatcatgtgagaactcactatcagaagaataggatgggagaaactgcccctcatgattcaattatctccacctggttcctcccatgacatggggattatgggaactacaattcaagatgagatttgggtggggacacagcgaacacatattgctccagtaaaactatctcagatttctttggaaacagaaataatttattattaattcaaaattaaatactacatatatatgtacatatatgtgtgtatatatgtatatatatagagagagaaagacagagagagagatacaaggaaatgagagtcatattaacatcattaggaatttaatattactagaagacagttcagaataaccttaaaatcccaaaagaagacattttgaagaaaaacttgatactcagttctatccaagctatggcaccaacatgaggttaagattctttttgtacgagagatggtcaaaacattaccattcataaccccatattaaaatattcaatatgcaaagtgaaaaaggaatgtaagactggggacaacattaaacaaaggaaatgacaaacaattatgatccaaagaaataaatacataagtcaaaaaatattttcaaagtatccattggtctttatggtctgcaaggatagtttccttacatacatgtttagtaattcaattttatttaagatcaaatcacaattttttgtgatttgagataaacaaataacaagtagagggctaaaaatactatatccaaatatttcagtgagaaactggatgcttttttcctaagatcaaaagcaagataacaatatcccataacattgtactgaaagttgtagccaagaaaatgaaataaaagacattgagactggaaaaagagaagttatttgtatttgcatatgccattatcttatagatagaaaatcctaaggaattaattcaaaagtattaaaactaataaattcaggctgggcgcggtggctcatgcctgtaatcccagcactttgggaagccgaggcgggtggatcacgaggtcagcagatggagaccatcctggctaacatggtgaaaccccatctctattacaaatacaaaaacaaaattagctgggcatggtggtgggtgcctgtagtcccagctactggggaggctgaggtgggagaatggtgtgaacctgggaggtggagcttgcagtgagctgagatcatgccactgcactccagcctgggcgacagaacgagactacatctaacaacaacaacagaaaaaaacctaataaattcagcaaggttgcagagtacaatatcaatacacaaagatcaattatatttccatatatttgcactgaacaatctgaaaataaaattaagaaaacgtcttttaaaaatcaccaaaagattaaaatatttagaaaaacatttagtaaaagaagtgtaaaattatattctgaaaaccataaaacattgctgaaataaagaagaactaaataaatagaatgacacccaatgctcatgtatcagaagacttaatattattaaattaacaacactctccaattgatctacagatttagtgtaatctttgttaaatgcccaccttacttctttgcagacattgaccatatgatcctaaagtttgtatgaaattcatgggactcaaaaatgtccaagataaccttataaaaaaagagttggaaaactcacccttcccaatttcaaaatttactataatcaagacagcatggtactgggataaagatagacatagagacatattcactgaaatagaattgagaatttacaaataagccctcatatttatagtcaattgatttttgacaacagtgccaagacagttcagtggagaaagtgtagtcgttttaacaaatggtcctgggacaattgtgtttttatatgcaaaagaatgaacttggactcctaccccacctcacatataaacaaattaattcaaattaaacaaaatattgaatataaaagctaaaattataaaatcttgagaagaaaatgtagatgcaaatcttcatgtcctcggattagccagtggctttttagatatgacaccaaacgcctaagaaacagaagataaaatgtgtaagttggacttcattagaattaatatttcaaagcacaccaacaagaaagtgaaataaacaacccaaagaattagttgcaaagtatataataaatctgtaataatgaagaaaatatttgcacagcatatatctgataagaagcttgtctagtatatatgaagaacttgaagtgaataatcaaaagacaaataactcaattttaaaatgcgcaaataatctgaatagatatttctctaaggaagatataaaattaccagcaagcacataaaaagatttttgacattagtcatcagggaaatgcaaatcaaaactactgtgcaagcccacttcccaaccagtgggatgactgcaactcaaaaaaaaaaaaaaaaaaaaaacagacaaaaacaaaatttggtgaggatgtggagaaattggagtcttctcataggctgcctgtgagaatgtaaaatgtgcaccgactttggaaaatggcttagtgtttctcaaaatattaaagatggaattaccatataacccagaagtttcactcctctgtatgtatcatatatcctcataaaatcttattggtgaatgtcaatgccacattgtttgtaatagtcagaatgtccatcaactgctgaatgaatagataaaatgtagtataatcacacaatggaatattattttacattaaaaagaaagaaattactggtacctgctacaaaatgtgctcaagtctcagaaattagagtagggaaaggaagacggacgaagaatagagaaagcttgttttgttttgtttccaagtgcaaaaatctgttttaaaaatatatggaaggaaagacatgctttaaaatgttaacttttttggttttaaaaacatttttccttttatataaacttttttctctttccaaatctgctttatttataacttttatagtcagaaaaaaaggagaattttcattcaacctgatatatagccagagagaattacacataagaataggaatgtaaataagaatgatagaactgttttctgactttaaacccccacattgtttatctttaaatcacattcatatattatcttaatttttattattttctcatgctccaagtatagagacaaagtttatggagtatcgttacatgtggagatattgtgtcaagtctaccttacctaaataatgttataaaagatttcaaaaaatgtttccagacattgtcaataggataacagaacacacacttaaaaagttgtcaacagtgtcagaattataaactgcaaaattgaattcaaggacatttaaaaaattcatgcaatttcaatccttaataatattagggagcacacaaggaaattaggcagtagttcaagtctcattttgttataataacttaggaatgaagccagccccaaatggcctgagtgactgtgtcgtgcgctctatgttctggaagggaactttccctttggcacttgtcatttgaaactcaatccaatctcataagatatggcatgtttgccttattcttccataagaaatgttgtaattcttccttatgtgaatgccaaaatcttgagaggggcataaagtaatgctctgagtcactgaatcctaaaaatactgatgccacagtcaagacagagagaacatctaaagcacagtactaatattaataggagagaggaaaatgaagagtaataatgattattgaggaataactaacatggaatccttggatcccttgggttactatatgagtgtatattttatgtctgtataaattgagtaggatacaatttatgtctgtgtcatacaactgtaagtctgtgtatttttccttttttttttcttttgtctgtatttttgagggtgagagctttcagtactttcatcagatccaaaagggatacatgaaccaaaaaagatgataattatttcaccatggaaaagaagtctatcttatgaacaggctgggttattagttcaggtacatattatgtgagtttttcaggataccactgcacttccttcttgtttgcttgaacttaatgcatgaattacttgacatgcatcctgagttggaggttaactgtccttttccatttcctcatctagtgtgacttaagttcagatcaatcaaatagagtcccaggcctagatgatgcctcttctgtactttgacatatctggagaagggtctgtgaatccacacctaaagtgcatacatctagagatctcagtctgatcctgacccaaggtgggagtgagccgcttgtctccatcctttccctccactgaccccactcctccacatattttctggtagccccagagtccctgctatagccacctccacaggtgatggtgataaggtagggagaccggtgaaagtccctaacataagtccctagcatatggcctgactcatgtagaatgcattcaagaaatattgtctgagtgctttcttgcttgggacttttttcatccctgctaccttctctcccgtttactttgcttgttattgggttgagctgaggaagccatgggggttcagccactgtagtcaagatggtggtcatcagctagggtagtcctcaaacttttaatgcacatgtgactatcctaggtatctttttaaaagacagattctcattcaggaagtttggggttggggctcagattttacatgtgtaaaagttcccagatgatacaattgccgcctgtctgtgaaccactttttgataaccaaggagttagaacactgtatatcaaagatatgtagaccaaagaagctgaatgtagatgggggtaggggagttgtgagtgtgtactcacgagcacatgtatactcttggtcagttgtgggtttactttgctccatcctctgaatcccatcttaaaagcaaggattttccaagtcatccaaattaagttaggcttgaattgtgccctgggctctacctttaaaattagagtatatcacctaatagccatttttaaaaggaaataaaaacaacaaataagggaattaaaaagttgtgtgaaaaccaaaaatatagttgtaattatataaaaagagagaatagcagattgtaatgctcaataaagcatcaataggttactgtaatagcaacagaacagaaataaatgattaagagatatttaaaaatagattaataagaaaggaaactgaggttgaaatgaattagacgaaatggaaaggcatcagtgaaagaagcatttctaggtctgacctatggaagatggaataataaggaacagagaccctactcatgaaaattgattgttctggtgaagtgataattttcaaaacaatacatttaaaatttgaacagaatatactttctctgcataatgtaccatttttctgcagttcattaatggtttctcttctgttcagaattaggtatttgtcattaattaccataacatgtccaaaagtcatcaggtgaacttccctgaagtatattcttatattttgtatgactcaaatattaaagtgtacaaatagaaaaaataagtattgcataagtttccttagcttatgagaaacctgaccatgaatagtatgatccatggatattggatgtatacattgaggtggtgaaggatgtgaaaagaggagagttttcccagagcttcaatagagacagaaaggtcttggcacaagccacgtggtctctccttcagagaattagggaagtttagtagtaatatttctcatagagctggtaaattgagtaatatctcattattctgagattgtagaggatgagattcacaaagacaggaacaaaggtcctggggtataaatgggaaaagaagggaaaaattaatcttagctggataggaaggttagtattgagggagttatccaagaatcaaggttgtgacaaactgcctgaaagtaaaaatagatggagttgtaactgagatgaggtcttagcctccagtttatgttgagttccacatgtttgaatacatctgacatctttttgggaacaagctcatcacaagggcccaggtatacaaaattggccaaataccaatacctcaggcatttaaggctagattcaatagccctaaatagccataatagcactagcagaagcattaggtagtgtctggatattggaagaactgatttaactagtaagtgcaagataatgtgatacaaggcccattgccttgctaccaatagcaatgtagttagaataggctaaacagatgtaacaaacccccaaatatctagtggccaaaacaatatacaggctcatttgttgctcatataacctctccaagacagctgttcctacctccttgttggatcttctctttgtgacaattcagggacacatgctccttccattgcctggatatgcctttaactagggaaggaaaagacaatgtggaaaacaacttccacttttaaaatgctttggtccaaaagaggtgtgtgtcgcttctgctatcattgccattgatgatagctagtcacattgctaactagttatatagaaggctgaagacatgtagtctctagctgggtaaccactttgcagctacatttgtgtactattgaagactagggagaatgagtcttgatggggagcatgtcatctctgcttaatactcatgcaacagaaggtagcccaagagcgaaaggggcattctcttcttttctacacacagaacaggataacttctgtttaatgaggacctctgagaatagagtaccccatgagcatctcaggggtgccaagccattaatattggtgggactacctgcttggaggtggaccctgtaatattggtagatgcacctgtgaaagcacatatcatagcagcatgtatcagcaagagagaattggacataggaggagaaacagcttgtgtgcaaggttaaaagatttgttcatgagcacatgtgagagagaagccccaggaacaaggaaatgagaaaacaattactgcctcctacatgttcccagaggagggggctgggagagcaattaagcataaagagcattaattgcatagaagatgctgagggatcatagatttgaaagcaatttcaaaatatgagtattttaagacttttagcaagaacagacaccataggctgtatatagtttcctggagttatgattaaaggatgaaaacaacttttgtttagatatgtaggtaggtaagtaggtagatatagatagatatgagaatagtaagtttgtttaaacaaattattcattacatcatagtgacccttagtgctttttgatgatactgactgatatggtttggctgtgtccctacccaaatctcatctaatagctcccataattcccacgtgttgtgggagcaacctggtgggagatgattgaatcatgggggcaggtctttcctgtgctgttcttgtgataatgaatgagtctcatgagatctgatggttttaaaaatgggagtttacctgcacaagctttctctgcctgctgccatccatgtaagaggtgacttgctcctccttgccttctgccatgattgtgaggcctccccagccatatggaactgtaagtccaacaaacccccttcttttgtaaattgcccagtctcaggtatgtctttatcaccagcgtgaaaacagacgagtacactggcttattgaggaacagaatataatcagcctccttcattcctcactcactaaaccaatgtgctgatcatttctagaggcaaggacactccaagaatcaagaaagagccgatgatgaggctttctattattctcctggactggacgttgtctcagcttctgctgggccatagaaccctgcctctaccttgacttacccacatgttgttttggtgccaagtattgagtgctgcattttggggtgtacaagacagattggcatattgctaaaaatgtgcgaggacagaaatgacagaaactagtctgtaagattctcataggttccacttgtcttgcactcgtcatgtacaaaaatatgccaagcattgtagttcattaattcagtccttaccaaagctggtaaagcagttattaatttatccactgtaaagttgaggacatccagccttttggaaattaaataactcctccaatatcacacaagtaataaggaggttgtgcagaaattgaaaacttgtgaatttccaaagctcatgcccagctggaggttagagacatagggttcctaccaaaaatgtgttcctagcactcagcatagtgttcagcacttaagaggaaacctacagcagattgctaaactgggtatttacttacactatccaaaagtaggaaggaaacatacccatttgtttgtgaattattgtatcaaatcctattaatttcatcctaaatattaaataaaattcctaaataggaaatagcaatgttcatataaagaagcagcaaattaatttattggaatcgacacattcctcaaatggagatttggttgatattagagacttaatgtacctcccttagtgcttaatgtataacagagattccacttatcttacctatataacctaagaaatttgaatattttataaagttactttttagaaaacctgatttatttgttttccttgtcatctcagatggataccttcctctcaaaatctatttggaatttatattttcaagtattcaattaactaacatattaagcaggcattctcctgtgtaagttcctagcaacttttaccacttgtactaaaataaaacagatagttaagccaaatgagttaacttttctgaaagtgtatctttatacaacattaactatagacatggaaaatacatttattcacgttagaaataaatgcttctgtgagatctttcattttgataaagtcaaaacaccatcttattaataactactatattaattttgcagcaaattacaataagaccacactgtatagttgtgccattcagatgacatttatgaaatgctctaatttaacatggtgacatatattacctgcatcttttacacattatagcttatatcctctgagcgaaatagacctaaaccatccaaaaaaaaagagagagagagagagaataatgcaatgggaaattatacccctttgagaactagaaggactataattacattgcttcctcttaaaaccattcaaatatgtaaccattgctgggaacagcagtatgtggggaacctctttacactctttctgtcttgaacactcaaaagattgagaaaaaaatattcctttcctactatagttttatttgagcatgcttcagaattttacctttttgcacactccttagagattatcgtggggaagtttagaaagcagtttcttggaaatgccttttggaggggaagaggagctataaaaatataccagcctgacaaatgacaggcattgtagactggaaaagaaaagacatcttggttttacaccaatgtagaagcttttctttgcaaatgagtatttttgacagctgagcaagatgataaacagaagtatcacaaaacacttaaatggaaacaagtattatgatgtactttattcacctggcattctccaattcatgacatttatatgtggcagaacccactgcagattcatttatttatttttgaagtggaatgagttccttacgaaggtagcctgttacattaatgtggacttttcttctctagatgcagaagcttaaggaaaaaagttattgtatctgtactataaataagtggtaagtctcagaatccacatcttagggctgagaaggctcctagcaagtacaatatactgtataaatatagacaaataaatatagatatagattttttgtgtaagcaccggcagtgttgcaaatgattagatatttcataaatgccttttctaaaaaggtattgctgaaaccagtctatttctagaacttatattcagatgtttagaggtataaatgcttcaatattggctaagcttagaaaggctatgtttctctgaggctcagtgatagacataccaacaatttgatgagatgcatgactaagaagaaaaagagagtaagactgagtccctgtgaattgattgacttggtgcagtggcagagtaggtagcaagtattaaagcaatagttcttaaatgttagtgttcataagaatcatcaacagaactttttaaaaatgaagattcctaggttttaactttagcgacttttaattctttaggtctggtatatttggttgtgggaaatcaaaagactcaacttcggaatacactgaacagttgctgactatagatttgtatattcaaaattttttggtatttaaaaatggtatgtatggtttattgagtcaaatattttaaaaactatgaatgtgtgctggtttgtttttttttttttttctggattggaggacaatttggggtaagcattctctatttaacaagtcataattaactccctgccaaaactaagtagaaattgtgatttctataactcctatatttgataatatctcctaaaaatatttcagtgatatagcatttaattgcaaataattcatctagtcaccaaacaaatgtagggacgttcctatataccaggcactgtgcatatcaaggtgtatattacagtgaataacagaaacactcacgaagtgttcaattgaatttaaccttgaaatgtattatttattattattatgtttaaataaactatgtgaggtttttttttcattgccaatgagaaacccaccctaacttcagaatttttatctttaagtatatcctattttaaccacccttacccatccactctcaatgatttctcctcagtgtggggccttgccgtggaagtgtgccctggtcagtgagttttgagagtccgtggaagctagattgccctcggctcttcagttcccactgcagaactcttgcagtcactggctattggatcagcagaacctcttctattttcagtcgcccattttcaaattggctcactgaactttaggttctccagttttcaggtctttcaaaagtccgacacccctttactatcatctgctttctcctacacaggggctaatgccatgcaggttttgtgactgctggtggtgtgttcctacctgctttttttgggaggcttctgggcacagctggtcacctagtttcattataatcatttttaatggctttgctgttgttgtgttgctgtttagttctgtcagcttttatcctgggatttagagagacccaagagttctgtggccacataaccattgatcctgattcccctggagtctcttttgacttttactgcctaatttaagctgaacatatgaaatacatgaaaaaactgaaagctcaagctcgtttgttgtttgtcttcctaggttatggtttccatttctccctctttctcaacctattttgccaatcaatgtctatccttccttcactttttgcctactcactacaatattcaattacacaaacataatttttcctctgcccaccccagcaccagcatttttctgggagtttaagtctcttatgaatctgggaagaaaggaactaaaaatgagcagggatgaatagcaaaatgagtgagtcaacgagtagcaggcaggacattagagtgaagctgttttcttacccagaagactgatgatgggaaaggaaaaaagaacaattcaaaattagtagaagaaaagaaataattaataaaacatgagtggatattaatcaaatagaaattggacaaaaaatagtgaaaatgaacaaacgcaatagtttgtcctttgaaaaggttaataaagttgatgagcagaaaacacaaagtaccaacatcaaaaacacaaattaccaacatcagaaatttaaaaaagagacatcaatgtcgttgcacattttataaacattaaaaaattacagttttatgaacagctctgctaataaatctgatgtcctgaatgaaatgaacaaatgaacacaaaaccaacaacaaaaaatagaaatagcctcacatatattaaagacatttaattcatatctaaaaacctttcaacaaggaaaatctcagtcccaaatggcttcactaatgaatttgccactaacataaaggaataaataatattagtcctacacaaactctttcagaaaaccaaggaagggcatatatttctcagctcattttgtgagggctacctaactttaatcccataacctaacaaagcactaaaagaaaagcccattagaatattccatatgaacatagatgtaaaataccttaacagcatattagcaaatggaatcctgcaatatataatagggtaatgcatcatagctgattggatttctcccaggaatgcaaagttagtttaacatctgaaaatcagttaatgtagtaagccacataaatagaatacaaaagaattcccaggtaatcatctcaatagatcaaaaaactttgaaaaagaattcaaaacactttcatgataaataccctctgcctactaggaatacaagagaacttcctcaaactgaaaagggcatctgcaaaaaccctatagctaatattatgttaacaataaatgttaaattttttaccactacatcaggaacaaagcaaggaggtttgctcttataacttctactaaaaattgtaacagaagtctaaagtaggacaaaatgaaaaaacaaaaagccatgaatatcaagaaagaagtaagactattattatttgcagaaaatatgccactgtatagacagtgggagtataaaaattgcttggcaagcatcaagtcccccacatacaatcccctcctcacactactctccttcgtaaagccatgaaaaaccgctttatattctaagtaaggacgggatgtttgatgtgcaaatgcagctgtaagataaatccctgagcaacatttttggccaccctgcccttcctatagaaagtctggggctgtcactgaggtagggttagtaatggtatgtgagactggagagatatgtggaaaccacctcatggtatttggtcttcactagttaggcaatagggagctattgaatatttctgagcacaggagtgacacagaggtgtaccaagtaggtaagaggcagtggaaacaatctacctcagtggggaagagtattgtatcacaaaatttgtttagaattgctagtacttggtgataattaaaagcaaaacaattttaactgaatcttattattttaattttacttacagaaagtgcatcctcttttgtgtacccaggtgtttcattctcaccaccttaccgtaggattattatcatcagaattaaagtagatgaggcaaggcacagtggctcatgcctgtaatcctagcactttgggaggctgaggcgagaggactgcttaaggccaagagtttgagtttatggtaagctatgttcgtgccactgcactccagcctaggcagcagagtgagaccctgtctcttaaaaaaaaaaaaaaattggaatgaatgaaaattaattgatagcagtttattaaatggattagggagaggaacagactggtagatatcattcagtatacaatagctggttagtgatggcaattctgaaagaagaagtggtagaaactgggaggtgttgctagtgtagtatgacctttcaaaactcacagagtgcatagcttgtggatgtatagaacaatgtgaaagaataaattctccagaaaggaagaagaggagttagagattttataaaagagaagtctatgatgttctctaggaaagaaaagaattttctgaagaatatatgcattgattaaatgatttccttttgccctcatttatatttattttctgttcaaatgaaacacttaaactaacactcaatttccgggacagatttcctgttcttacattcttcaatttgctttttaaatttttactttgtttagcaatatcaacattgcctcattggcttttagtgagtttcttgagaagatgtaatctatagaacattagttcttctctcccaccagacagatgagtgcatagaaagacatatagttatactgctgctgttttaaaagtgttgcttcaaattacctaaaatatagtgactattagataatcactgataaaaactgtgttcatctaatttattcatcttgaaatcatgcttcatatttcctttaagcacaaaatagttatgttcacacatgcacaataaatcatatatggattacttgatgccttgaattcaccctcatagaattttatctcctaatgtaaagaaaactgactggggtaattattgcaggatcttactcttttctgttgtcagtaaccttcccaccaaactcattgtgacaattgtcacccggttgactgtgcatatccaccattgctccagagcctaggccagcagacttttgctgcatggtccaaaatggtgaggtcctgggtgtgatcacaaggcaatatgcagcaaacattagtgaccatcagtgctaacaaagaaacttacaaagtaacaacttgaccacttggccaattcttccactgtgttttcagctcttcacaggtgtaggccatgccttaaacttaattgagtctagcactcttcctgttactattattatatttgtagcttatgataagcagagtgaatttaacataggggttatgatcatgcatttgagagttgggccacttagtaactgtattagtccgttttcacactgctgataaagacatacctgagactgggtaatttatacaggaaaaatttatacaggacttacagttccacatggctggggaggcctcacgatcatggcagaaggcaaagaggagtaagtcacatcttgtatgggtggcagcaagcaaagagagagcttgtgcaggggaactcttgtttttaaaaccatcagatctcgtgagatttattcactatcatgagaacagcacaagaaagacctgctcccatgattcaattatttcccactgggtctccccccacaacacataggaattcaagatgagatttgggtgaggacacagccaaaccctattggtaactgcaccacctttaataagtaatttgatctttctaaggtttaaattcttcttctgtcaaatgaagattcatgtattttcacaaataataaaatgacgaaaattcctgccactatggagcttacattgtaaagtgatttggggagttggaagagaaagaacaatcaataaatataaaaataagtaagtttatttactaagttaaatgctataggagaaaactagacaaagtaaaatgccttgagagtaccatattaaggaaaggaattgcagttttggaaatgtagccaagagacttttaattgaaaagatggcatttcacttgagacctgaaggagatgaaggagttagtcatgtggaaatctggaagaagagacctaggcagaggcagcagcctatgcaaacaccataaggtggaagcacccctgatgtattcagaaaaggggctgtatagctgaagtgagcagaagaaagagtaggaatgtcccaagcctacgggatccttgtgcaagctgcaaataattggtcctttcactttgcaagtactgccccacatccatcaaatactttagaaggtttgaaaaaagtttgactatcaatcacttgatgaattttcctgcccactatttgctctataccagtgtgaaatgtacagagtaatacttccacttcatctttaccgagcacttactatgttccagagatgatgctaaacatgtttacattaataatctcagttaatcctgacaacagacctatgaggtagatattattatgctcattttattgataaatacgtgaagacttcagtagatttaagttgttcagagtatagttaattctgtggctagtaattgtggcacataatcctaatgttccaggaatttatatcatttagttgaggagacactcctcaactcctgtctcaggtgacaggagtaagtgaaattctaaggcacaatatagcatggtgcataagcaggcaggactgcagccacagaaccctcaattttaattcaggctaagtcacttactttcccttttatgttagagacgtctgttagtttttctacaggaagtataatacctcacagggtaatttattcacaaatacgaaaacatgtataaaacatcatagcagtctgcctgcaatatcgtaagtgttcaaaagggttgtggatattattattgttgttgtaagctaaggaacgctagaaaaacatcaaagattcaattactcaaaataacttttgctgagcatctactacatgtaaaatatgtatactgtgggatcaatggatgatgtaaaggtgcaaaaggttctggcccttggggagtgtatggtacactgggaagttatattttcagacaagacataataattctaatacaagctagaccttaaggaattgaatgacagaggtaacaagaaaatgctgtaaaatggctgaggagagaaaaatcctctaatttgggaggagctcagtattgacaaaggctagaaatgggtagagaacactttcccaaaagagatgtcgtggtgcctggtgagacaggctgtgaacttgacttctcccatccgttccattattaatgtgtgtctctgtgctctagcattcatttcatcttgtggacatgctattgtttccatttaaaaactctcttgatcacaatttcttctgtggcgatggtctcatgtcctgctctcctttttggcaaaactccttaaaagacttgtctaggctcatgcctccaaatcctattctgctattatttcctggaaatatatctgtcaggccttcactctcatcattactttgcaacttttcttgttaaggtctccaaggacctctgtctttttaaacaaagctaaattctgtcttcattgtatttgacatacaagcaggatttgacacagttgatcactctcttttcatttagaggactccacattctccgggttttcctcccatatccctgactatttcttctgtatcctttttctgtgccctcctcttacctttgaacacttattgttggagtgctctggaactctctttagaggactttcctgtatctacgctcacgcccttggtgatattttacttcaaataccaattatacacagacaatactcaaatgaatttcacaatcatatttccaattaaacacttaacatgttttatatatatatataaaatattatttgaatttaattatctttatcttcacatcaatacataataatctatcagcaaatcatgttggttctattttcaaaaatatccatagtctttcattcttcctagattcaataattcctttgcttgtctatttagttttctatatgtcattaatcttcctcatgctgacgtctttgctacatgaatatatacatatatatggtacacatacatatatattttatgcacacacacatacatatttatgctcaaggacctcctgccctgctatcagcctagagcttttcatatacctctacatcctcatttcctgaatcccatgccttccattcttgttgctgttgtctgtttactttctttttgctggaactatattactcaatagcttcctgatataggaagttaaagttttgaatccttgcaaatccagaaaatgtttgtattctttctttacaggcaaccgataatataacttagcatagaattctggattagaaataactttactcataatttggaaggtaccattcttagctttttagtttactataatgttgcagaatactgcagtgatattctgtattttctatgtgacttattttattggtctctggaaatttttgtttcctttttatttttggaatttgaatgcttcatgagattgcaccttgatctgggtttttccaccagcatgtggtgagccttttttttaactttttaatattttatttttaatcaatcaacacataatatttatacctattatgggatacagagagatatttcaatacatatgtaaaatgtgtgagtatcaaatcagtgtaattagcaaatccattaccaccaacctgtatcatttctttgtgttgggaacattcaaaatcctttcttctagctatttgaaaacatataataaattgttgttaactatagtcaccatacagtactataaaacacaggaatttattcttcttacctatctgtgattttgtatctgttaaccagcctctccctatccccttctccctgctatccttccaagactccagtaaccactattcgaccttctactttcatgagatcaactggtttagcttccacatatgagtcagaacaggtaatatttatctttctgtgccaggcttatttcacttaacataatgtcttccgggctaaacataatgccctctaggctaatccatgttgcttcaaaagacagagttttattccttttcatggctgaatagtatttcattatatatttatatatgtgatatatgatatatatatatatatcaaattttctttatctattcctttgctaatgagcacttaggttgattctatatcttagctattgtaaatagtactgcaataaacatgggagtgcagatatctcttcaacgtactgatttcaaaacgtctggatatatgtacccagtagtgggattgctgaatcatatggtagttctctttttagtttttttaagtgaccttcatacttttttccataatggtatgctaatttacattcctaccaacagtgtataagaattcccttttctctgcatccttgtaagcatttgttattttttgtcatttttataacatattttaactgggaaaagataatattgtggcttttgtttgcatttgtctgatgattagcaatgttgagcattttttcgtgtacttgttggctatttgtatgtcttcttttgagaaatgtctgtccagaccatttgcacctgttttaattggattatttggggccattgagttgattttcttatatattctaggtattaaacatttcttggatgaataccttgcaagtatttttccattctgtaggtcgtctctccactttgttggtagtttcttttgctgcgaaagggcattttagtttgatgtaattccatttgcccagaccaatgtcctgaagcacgtctcctaggtttacttctagtattttcatagttttgggtcttacgttgaagagtttagtccattttgagtggatttttgtatatggtgagagacgggggtctattttcattcatttgcacatggatagccagtttccccagcaccatttattgaagaggatgtccttttcccactctttgtttttggtgactttgttgaaaacccgttggcagtaaataggtggatttatttctgggttctctattctgttccattggtttctgtgtctgttttacgacagtatcatgctgtatagctttgtagtaaattttgcagttaagtagtatgatatcctcagtcttgctctttttgaacaggtgactttgtctcaagattgatttgtctagctcagtggggtggctcacgcctgtaatcccagcactttgggaggctgagttggacagatcacttgaagtcaggagttcgagaccagcctgaccaacatggcgaaagactgtctctactaaaaattcaaaaattagcagagcatggtggcgggcacctgtaatctcagctactcaggaggctgaggcaggagaactacttgaacccaggaggtggaggttgcagtgagccaagactgtgccattgcactccagcctgggtgacagagagagaccccacctcaaaaaaaaaaaaattgctttgtctattctgggtctttatggttccatgggaatttaaagaattttttcttctatttctgtgaagaatatcattagtattttgataggaatcatattgaatctgtagattgcttttgataatacagtcatttttataatattagttcctctaatccatgatcatgggatgcctttccattttcttatgtgtcctctttaatttctattataagttttatagttttccttgtacagaacttttaccctttggttacatttattcctcagtatttttgtttttttagctatcgtaagtgagatttcatttttacctagtttgtgcttgttgtataggaatgctactaatttttatatattgatttgatatcctgcaactttattcgtttagtttatcacttctaagagttttttggtggagtgcttagtttttattacatataagatcctgtcatctgtaaaccagaactagttgacttcctcctctccaatttgtattcctgttatttctgtctcttgcctaattgctctggctaggaatttctagttctaggttgaataaagagtagtgaaagtgggcatcaccatcatgttccagttcctagaagaaaagttttcaccttttctccgtttaataagatgttggttgtaggtttgtcatatatggcctttattattgaggtacatttcttccatactaatttgctgacagtttttagcataaagggatgttgaatttcatcaaatgctgtttctgtcttttgagatggtcatatggtttgtccttcattctgttgatatacttttatttatcccatttattcaatttgctcatattgaatcattcctacatccttggtataaatcacacttgatcctggtatgtaatatttttgatgtgctgttggattcggtctgccagtattttattgatgatctttgcaactatggtcatcaggaatattggcctgtagtttttgctgttgcatatttggttttgctatcagggtaatgctggccttataaaattagtttagaagaatttcctctccttcaattttttggaatagtttaagaaaaaatggtattagttcttctattaaagtttggtagatttcagcagtgaagccattgatcctggacttttctttgttgggagactcttaattactgaatcaatctcattacttgtgagtgttctgttcagtgttctattcctccttggttcaattttggccagttgtatgtatccacaaatttatccatttcttctaggtttttcaatttgttggcatatagttattcataatagtctccaatgatcaactgtatttttgtggtttcagttgtagtgtctcctttttcatttctgattttatttgagtcttttttctttttttctcagtctagctaatggtttgtcaatattatctttcaaaatatcaactttttgttttgttgagcttttgtattgtttttggtctcaattttatatccttcttctctgatcttttttatttctatattgtgccttgcagaggacctttctagttaaatacatttgggaacttttgagcttcctggatctgggtatctatgtctgtcccaagacttaggaagttttaagttagtatttcattaataagtttttattaccctttttgtcatcttgtctttctaagctcccacagtatgaatagctgtttgcttaatggtgtcccacaagtcctgtaggctttctttattctttcttattctgttttctttttctttctgtctgcttgagttatttcaatagacctgtctttgagttcataaatcatttttttctgcttgatctagcctgttgtcaaaactcttgattgtatttttatttcattaactaaattgctcagctccaatatttctgtttggttcatttttatgataccaatttcttgttgaatttctgatttagatcatgaattcttttcctgatttttttcagttgcatatctgtattttcttctatcttgctgagtttccttaacatcattattttgaactccttttctggcattttgaaaatctcttttactttggggtctgttactagaggattattgtgttcctttggtagtgtcatgttttcttgctttttcatgtttcttgtgttcctacattgatacctgcacatctggtaaagtaattgcttcttttaatgttatggactagcgcttatagggaaagatttactcctgtagataagttctagagtgttaagtagagggtgataacttgggtcctgagtgggcacagtagtgtagtctctgtgaagtttcttcaactgtaatccatgtcagtaatgtttgtgaatgcttcactgacctaacctgtgggagtttgtggcagcagtgacatgactttactggaatcaggcttattgagtgagttatcaggatggaggcatgtttgtgcatgtgatgggtcacctagcttaggaactggcttgctttgggtgaagccgtgggctgtttctcaggccgggggcatgagtgttcagtggatcagctggttctggaactggttcaccaggagtgaggctgttgggtcgtttctcagtttaggggcataggcacatgttggtttgccagccattaagccttttaaaactatggtttcatgtctggaaaatgtgtattttatactaattctttattaacttattcctttaattttttttccttttggtgtatttctgaaaatttgttttcatctcattattattgttagcctttctgatgtattttcttatctttctcttctaatcttttagttgagatttttttccagcctttttttttttttttggatatagaatcttagtatattgtctaggctggactcaaactcctgggctctaacaatacttctacctaagcctcctgagtagctgggactacaagcacatgccactatgcctggctgtatatttttaatatttaagaattctttctttcaccaattgtttattcttttaggcttttttttgtttctatattttttaatgaatgcaacttttatcttctggggataacagagatattttattaaattgttattagttgatgatttcttccatctctaattccctgcattgtttgtttcctcatctggattatcatttttcatcctcctcctttatttttgtttctgtcattcacattgtatattttgcacatttgatgaattttgccatctgctttattctgtagagaaatggtaaaacatttccaaaatggcctttactcatgtttatgagcagcaatacagctttactttgcagaggttaaaagctcaaatattagttctagagttcttatctttgtagtatttttctgccagtttcctctttatggaaaataactctggctcccggctttctttaaactgtgtagaaggggagttgtggtggtaaaggggagaggcagtgtatacagactttcacttaatcctttcatgtctaccttgtgcctcttccaataacaagttgttgatgttccaatataatggagctggttaatttcaattattcttgacaataagactgatgtcactgtggagtaggattagtttggctggctgagtggggttgaaaaggggacctgaaaatctaaatactttctatgtggaatacctctaattcatgattctcaaccttggcactatggctattctgggctgggtaatttgttgtgagggatggatatgtgcattgcaggatgtttagcagaatccctggctacatatcagtatactacatgccagtagaactcctcccctcactgggacaaccagaaagttcctctggggacaaaatcttccttagctgagaaccattgtttaactttagacctgtgtgtgtcctcttacttctctcaatgtttcattatcttcaagtcttaaggctctcaaagattctataggaaaaatcagttttcatgttttaggaatccaattcagctagcactcaagctgtaacttctctgattattcaagaatgttgtcaatatttatttctatttcttaatttcattttctgtcttcaaaatttttgtaaaatgtatttcttccctattgatttctctgctggcctcattaaaattatgggttatattttttaaaattcctatttttttaattgaagtatcaagaaaaagaggaaaaggcacatgcttgatctgaactttatcaaaaattggtaattgttttcatctcttactattaactcttttttaaatcgatcctcttgctttaggaatccaaatcagcctgcactcgtactgcagtttctctgattagtcaagaacgttgccaatatttatttatatttcttcatttcatttttcgtctttgaaatttttgaaaaatatatttctccattattgttttctctgctggtctcattaaaattatgggttttacttgttaaaattgctgttattttaaagtagtgagaaaaagaggaaaatacatgtgcttaatctaaattttaccaaaaattttatattttagtaaatgtattcagatgcatatttttctgacaatgggcagtcttagttaacacctgtatcctttttcttgagcaagaaaataaatttattataatttttacttattctgccctagtattcctcatggataaatcgtgtcttaattttattaatctttgaatgcatcaattctaataagttggatcctttgtcagaaagcagaatgtgtacaatatacttatcccttagttttgtcttcctgggaactggctcttgatcacaataggatatatacctacagatcagcttcattataatttaatttactgtatttggcagcaacatcttctagtggtaacctagaccgagatgaaatattccatttcaattgacagttataaagctacagaccatagatttcagttatttgagtagttactacattaaaacacatctttttttcccttcctttgctcccaaccacatgtgcagcaaccagtatgtttctaaattttgctcctgtttataatgctatttcttaagcttctaaacatcgcagtgtgcatttcacctctgctaatctccatccaaattctgctatgttttggagtttgtaagaaagtgtagtgctgatgaggggattgaagtttcaggattccaattttggctgcttaacaggaacagttgaaggatggcatgaggtttttgatccatggttttccatttccctggtatagtaagcataggtatcactgccaaacttctttggagctctatgttatttgggttgagagcttggagctatgttaaacagctgaataaatgtttcccaatgcagctctgtctatgatgcagctcctgaaaattctctctgaatgttgtcaactagttttctcttaaattgagtttatagttgttttgtcaggtccaaatgtctttttgagactttactttgactgaacattgtgatagaatttatcctcctgcttgaaatgataaaaatatggacaaaatgtattaaataattgtttgctagatgttggacatcaggcaatgaggacaatgtttgctgagaaataggaaataaattatgtgaatcttacaattgacccggattactgcttacagagtatttctagaccacgacttagggagagaaatcccagatggagctcagagagttctccaaattgaagagatatagccaagtgtttcaggaattcaaagtagttagagtttgcagagagcagatagaggaacacagagataatttcacagatctacagagcatcttccttaagaattcactttactacggttcactgcatgtatgaggctgcagaaagcacaactttcaattattaaaagtaacaataattaacactcatgtaatgctgggtatgtgcctatttccactagctgaactggcgagaaaatttatgattcgtgggatatttgataagagtacacaaaagggtctagcctcaacagtggagaatagccctaggctgataactacttcaataccacctaataaatcttaagagcaagactcaaaaggaactgtttccaagtaatttaactgcatccaagaacaaaacacaaatatatttgtaagaacactgaaatatgtagtacctaacaagaaaaaattcacagtctctggcaccaaatcaaagattatcaggcatgtaaagaagcaggaaagtacaacttataatgaggatgtaaatgcatcaatcaaaattgatccagaattgtgagaaatgttagaattatcaggccagtatgttgaaacagatattacaactctacatagtttaaaagctacataaaaatatggaaggtactaaataaccccacagatcaaaattccagagaaaaacctacactgtatggaatgaaaatacactggatataattgattatacattaaacataaaacatttatgttatatataaaaaattagtgaacttgaagtcatagcaatataacctatccaaaatgaaacagagttgaaagagcatttgtaaaaatgaaaacagcatttgtgagctgtgggacaacttttagaggcttggtatatgtgtaattggagtccctaaaggaatggtggggtggaggtgggaatataaaaaatattcaaataatttatggctgaaaaattccaagtacagtacactgaaaaccataaagccacaaacccatgaatctcaagaaaactaaaaaataagtaacatgaaggaaatcacaaaaggcatattataattgaattgctcaaagctagtgataaatttttaatgataaaataaaatactacagcagccagaggaaaaagacgtgttaaatacaaaggcaaaacagtaagaatgacaacagatttcctatccaaaataatgcaaagaagaagacagtggggcaacattcttataactatgaaagaaaataaatagtgcacttatgattctatatctagtaaagatatctaagatgaaggtgaaataaaaactatttgcaatacatataatgaaagagttcatcacacagaaacctatactataagacacattaaaaagaagtccttcagtaggaaataaaatggtatcatatggaaatatggatctgcacaaagaaacaaagagcacccaaaatggcaactgcattggtaaatacggagggtatttttctaatgatttaattttctttaaatatagttgacagtttaaaaaataataataatatagtaaaagttttataacatgtgtaagtaaaatgtttggcagtaataacacaataattaagagggggaaaaggaagtacccttgacccttgaacgacatgggagttaggggcactgattccctgcacagtcaaaaattcaagtttaattttgactctccaaaagcttaactactaatggcctaccattgaccaaaaaccttactgataacatgaacagtcaattaacatttattttgtatatattatttactgtattcttaccataaagtaatctagagaaaagagaatctttaggacaatcataagaaagagaaaatgtatttactatttgttaagtgaaagtggatcataaagatctttgtcctctttatcttcactttgagtaagatgaggaggaggaataagaggaagaggagagattggtcttgtggcctcatggctggcagaggtggaagaagattcttttataagtagactcatgcagtgataacccatgttgttcaagggacaattgtataccgttgtaagatccttatactctatttgaagtagtctgtcacttaaagctaggctgtgataaagatgtaggataaaaaccactaaaatcataaaacaaagagttataactaataaaccaacatggagataatttgaatcataaagaaatataaaataacacaaaacaggcaaaaaaaaaaaaaaggaaaaaagaaatcccaagcagatgggacaaataggaaatatcaagataatagatttaaacataatcatatcaataataatgctaaatttacatattctaaatactccacttaaaatatacagattggaagattggttaaaaaaggaaaaagtacaacttaactatatgctgcttacagaaaagatatttaagtataagacacaactaggttaaaagtaaatgttggaaaagataaatcttgtgaacactaatcataagaaatctagggtgactttattaatatgagaaaacatgaatttttagaaattttgtccaagataaaatattgcccaggatgaagaaagtaatttcattttgcaaaaggagtcattttgtcaataggacataacaattcttaatatttctgtaccaacagcagagcttcaaaatgcacagagcaaaaactaacgtaactgaaggagaaagtaaaatccacatttgtcggcaaaaatttcaatacccttctctcaataattaatagaacaaactgacaggaaataagtaaatctatagattagaacaacactgtcaaccaacttgacccaatggccagttatggaacattcaacccaacagagcagcaaactacacctacttttcaggcctacacaaaacatctaccaaaataaatcaaattctgaaccataacacaagcctcaatagatttaaaagaattcaaatcatataaagtacattatggggctgcagttaaattaaattagaaatcaataacaaaataacctggaattactctaaatatttggaaactaactaacaaaattctaaataatccaagattagaagaggaaacccaaagaggaattaagaagtattttgaactgaatgaaaatgaaaacacagcataacaaaattgtgagatacccaatatggcaggacttagtagtatattaatagcactaaatgcctatgctaggaaaggatgaagatttcaaagaaatatcttctactttacaaaactagcaaaagaagggaagacccaagccaggctaatgaaagctatttctgagtttctaactgcatctcatggggatgatcatttcttttctctgctcttgtggctgaaagcatgttaaggccaaaattgtgattcaggcaagacccaaatttataagaccaagattgcattttaagccataaagagcaggagaatctccatggcttgaactgtgaatagatatttgtttgttatcagagatagtaattgtactgctttatctgtatttccttccatgttagtaaaagaaagctcagaagtagttgatcacatgatcatagagaataaactacatttctcagtctccttggcagctaggtgtagaaatgtggtttaagttctggtcaatgatattttatctattaacgtttgctgtttaagttagtggctaaaaacaataaaaattgcgtatttatttaggattctatggtttggctcagtgctggtgtgcactggcttgtccaacctcttctgggctctctcatttgtctgtgattagctagctggtcaagcagcagttagataggaagacctcactctcatatgtggtggttggcaagctggctgttcactgggacagtaggagcaattattagctggggcacctcagttctctgccatccaacctctaatattccagcaggatagcatgagcttgctcacaaggtgatctcagagttccaagcccagcaagaaagaatgaactctaaatttgcaggcattttaaattgtctgtttgaatcatatttgcaagcattatatgtgctagtatttggccgaagaaaaccaataggtcaatctagagttattgtggaaggatcgtaccaaagagtgtcttagtgtatttttaaaggaaaggggaatgcctttctctctttctacttcttggtggacagcaattggttttagagtatgagtagatttgtattttctcacattaaaaaggtagaatctacaactgtggaatctatagaagtaaactgggtattttcagttgaatcttgggaaactgactaaagttaacatttttaaaaataataatgctttattttatttttaaactacattttaagatatagttaatatacagaaattataatctatatgtgttacagagagattaatgaaatgggagtaaacttgttattttattaatttgtggcagagttcatatagaaagaattgtttttattgacaaaaatatctcgataagacttaggttttggcaagaatcaaggcaatattatacacttttgagatgtctgtgaaaaagtgaccatgtaaagtcaggtgtatagaaaaaagtgaatatgctttatagcagagcaaggaggaagaagagagaagccacagaagatggtagataattggagtgcaagatggtaggtaattggagtgccaatgaaaatctctagctatagggaaactaaagggatattatgaattgcaaagtaatgatttaattcctcttttaccccgaatctttaataaggtttaacgactacaatttgtttgtttgttttgaacaagacttcttgaaattgaggcattagctgagtttcacctctgggtgacatagggcagtgctggcagaagccagaaagacttcaaaatggaagaagcagaagtgtagggtcagggcgactacgaaatgatcaatacgcatagaattcttataaacttaaggaggacttctgtcattcagggatggaattagggtcataggctgccttatctagatttcaaaaggcaaggacgctccagatgatacatgcattacatgtaaataagaatacaacaaggccaggtgcagtggctcaggtctgtaatcccagcaatttgggaggccgaggcggacagatcacctgaggtcaggagttcaggaccagcctgaccaacatggtgaaactgtgtctctactaaaaagataaaaaattagccgtgcctggtggcccagctactggggaggctgaaacaagagagtcacttgaacctgggaggcggaggttgcagtgagccgagatcgcaccattgtactccaaatttgcaggcatttttaaatgtctgtttcaatcatttttcaagagttaaactccatctcaaaaaaaaaaaaaagaaaaaataacaaaacatataaaagataaaggttttgcacttttatttctctttaccttttgcacacttccttgctctttgaaaaagtattgtttacatgtaatgtttaagattattctttgacggaaacatcacatatgtccaatgccttaaggtgtttactatctctttggagaacaggactgatcctgtaaagtaccagcaaagactcaggcctgagttatgggttgatgtacttgaagtgttacaagtatgtacccacacgcctattggattttcatggtatgcctatatgttacacatatccaccaataaatgccatctatttttgtaggctgaatcaaatctctgtcttgagtaatgattttgtatcctttggactagatctgaataagactgagaaacagccaggcacaagaaggcaattcattgttctcactcatctttctaaacctatatgcatctttgatattgaggttcattattagctacaactacatttggtttgcatataaccatttatttttcagtcttagatattttcatatcaattgtcttaattatccttaaataaagcttccagtgagtctctatttcttggatgaggacaattgaggcagtgatagttctttaaaaattatttaatttctaagtccttcactatatcttgtaactgaatcccaacctagatatttttaaatatccttgaaattaaatataaatcaaataatatctttccacatgtaggttacttccctctatggtaactctgcctccaaatgtgaagagctggattcaatccaagtgaaagaaaatcagtggggaaaatgtcagggactataaaagagatttgaagtctgtacccacattgctgtgttagagtcctgagttattaaatttctcatatttatttgacattttatatacatatgtccacttatgaagagtttagttcttatctttctttaatcaacacagtattaactatgcatgtagtagatgaacactgtattttatgtatttgcattcttttcaaaccagatgcttaaagaataaaatgacacagtgttttagctgttattttgctttaaaatgctttaaaacaagaaacatttttggaatttcttatcacaatataaatcagctaagtatatttaatgtggtgaaatgaatcataaataggctgaaatagtcctaaaaggggagttgggtaagaaaaaaatgtattaggatcaatatcaataggcataaataattctattaacaaataacattaaacattgttacactgtttatgggatgatatcattatatcattatagaaagattctcccttaatttaaatacctagcatgtacaaaacaagtttaaatcaatgagacagtaaacaagaggaataaaatagagaggtgggctgggtgcagtgattcacgcctgtaatcccagcactttgggaggccgaggcgggcggatcacgaggtcaagagatcaagaccaatatggtgaaacctcgcctctgctaaaattacaaaaattagctgagcgtggtggcgggcgcctgtagtcccagctactcggaaggctgaggcaggagaatggtgtgaacccagaaggcggagcttgcagtgagccgagattgagccactgcactccagcctgggtgacagagcgagactccatctcaaaaaaaaaaaaaaaaaaaaaaaaaaggggaagtggtgtcctaaagactaaattaactgctgactattttctattttcagtctctacatatttatatttttatttctttatatagcattgaatggttaattccccatttcccttttattcttatacgactaacttctatgggttttattttcattcagttctgtatattccccctgctgaagcctcccatgttgtgtgtcaagaggaaaaatatcttattaccttcttgtctgttgaacatttagttttcttctccctccctccctgtcttgtacctaatgagcaaattatctaaaaatagatacgttcatcattctacaaaatgttgtatcttctctagattggaggacagtgtaattgtaagagacacgtgtctggcaggcagtgcaatcagtgccagaatggattctacaatctacaagagttggatcctgatggctgcagtccctgtaactgcaatacctctgggacagtggatggagatattacctgtcaccaaaattcaggccagtgcaagtgcaaagcaaacgttattggtacgtgtaacgcaaaagtttacagtcacatctctattaccatctggaataaaattctctatttgatttcttaactgaagagtaaagcaaatttctttgctcaagacaggctggaaaaaaaaacaatttggatgaaattaactgtttaaaatgattaaattaataattctatcaaactgcagcttgaagcttagtttaatcaaccctttagaagtttctttattctgtagatgcattaattcccatggtcccatactaataagtcatagaaaaatataatttgcttactgcatagatgtttcttttagaaaattagcactttttcaaaatgttttacacttaatgagttctaagcaaatcatttccatgctagttttcttaatagaccaaaataagtggattttttcaaaatattctgtgctacagggtcctttgtgataaatctttccatttttttctgttatatttctttgaactgttcctatgaaatgcaaaataagtcaacataattctacagatcatgtatattgctagggttacttacaaagggctacataattttaattttgtaattcagcaccaagttgattataataaacagctgccttcggtgttatttatcatttttttatacaagacgtgcttttttgtttgttactcccacaggtatttttcggaaattagatttgattatagcaatttattacatccaacatttttgaggggaaccaccgccacataaggacaaaatttatcaagtgcctaaaatgcactatgttcataatgcactttgaaattttgatatatgagaatattatgagaggaaagtttcctgatgaagtgagccctgtattgtaactgaatatgtcttggttcctataggaagtttaaaaaagacctttgcctttctattgtcattcaagacaccaagtcatccatggtttttctaacactgacctgaaccttacaatagtaaaaatatgcctggcagtgattacacacactcctctctctctctctctctcacacacacacacgaatgcttacatgtacacatgcatatgtacatatcattctgaatactattttcatttctgtgatatacctctaaatctaattctttatcttttatttatgtaagtgtacatcatgctacacaattcagctagacaagcgtttcaatttaataaagagaatgtaggtgtgtttagtggcattacacgagatttctctggtttaaagaaacattacatgaaaatctgtaccataatttacctatatgcatctcaagcatacagaaactaattttttagaaagaaagaataacgtgtaaagagaagtacatatttgtatgtgctatccatgatgctgaaggaattctaagaccctgaattcaatttgtatggcatcctttgttctttaatgtgagatatattttaaactcaagatgtgaaaacaaaagttaaagcaagacctttaaagacagtgaaataattacttctttgtatcaatggaatctttcttgtgatggttagattccagagcttgaggaagggaaaaatcaaaattaatttagaatgtataatgccatccctactatttgcctgttttgttgattgatccagatggttttctgcaggaaacataaatatatattttgtgaagactaaattacttcagtattataaataattattatttctagtgttatttctgcaaatgtagtactttttataaaaacaaaaacttgatatgcatatatatttactttcctaatgggatcagcaagtaactttattcaatttcaccttgttaatatgaaaaaaaaagaagcccagaaaatacaagtgtatgttgtatacgcttcagaaagcaaactgttagagttaacaaaactgttaaatcttactaatgattctatcaccagtaaaatacattagcaccaataattttattaaagtaggtcattcatctagaataaaaagggagaagaatgtgaattaaatgccaagtgtgctaactcgcctgtacttgttaacaccgaatgtgatgccctgtaggccttcctgactatcgttaggaatagattacctgtcaggaatatgtatggcatattcaaataagcactgtgcatatttttaaaactgatatgatatgaatccatgtagaccaattttaatagttcaaaatgagtcataattcttgttaacaatacagttatttttaaaatttgcagcaatagtggtccttttttattttccttattgaaattaaatgatatgccttaggtgagtcattcatcactgttaaagaacttgccttcattggagttcttgaatttttatccatatatatacatatatattatgtatttccttccagtttaggaaatgcttttctacatatgagttcctgagtatgtttttgactcttattttaagattaatttttaaattgcaattatagcttgaaataaatgtttcagttgattcaacccatgcagtgagttatttaaattcatggatatttggaaactatctaaaggaagtattttgcatctaaacatttactattctaatttttttatttctttgccttgtaatacccttttatcttttagaataaccttacttgtcagagatttaagtttaggtgataaaacatttttcttcattcgtaaaatgtatatgtgtactcctttaaatagaagtaatataaaaaacagaatttacttagtgtttaaagaggtatgttctgagtcacacaagatgacaagcaatgtgattgctttatgagccaaggagagcatgatttatattaattgaaaatgataaaatagaggagcatacaaaaggattaaaccaaaaattgccctggataagttttatttatattaattacttaaatgtgtggattcagaaataagtgtatatgctgttttcacaaaaatagttatcagctgacatttttttcttttttcccagcttcacgaaggtataattaaataaaaattgtatatatttatggcagacaacatgatgttttgatatatgtacacattataaaatgattaattccagctaattaatgtatccatcacctcatgtacttatcatgtttttggggtgagaacatttaagatctaatctcttagcaattttcaagtatacaatacattattattaagtatagtcaccatgctgtacaatagagctccagaacttattcattctgtctagctgaaactttgtactcagcttaaccttttattaaacatctttagagatttcttatctttagaaaaacaactaatttgttatatgtaattctactataattttaaatgagcacatttgttaaaatagtttttaagatttgttaaagagaaaaagagctccagcatatgtaacagaaacaacatttgcattaagcatttttctttgcattaagtaataattaaaaatttatgaagttcatcgcaaacagttgtatattaaagctaaattaaatattgtcattgaattttgagagtaagattggccccctatggcattgcttgtgagaaaacactcaatattttgtgttcgtatcatctgcagtagcattgtttgtgtctcgtctatcttgaatgaaatcattttcccatcctcaccttttaaatatattttatctttagggcttaggtgtgatcattgcaattttggatttaaatttctccgaagctttaatgatgttggatgtgagccctgccagtgtaacctccatggctcagtgaacaaattctgcaatcctcactctgggcagtgtgagtgcaaaaaagaagccaaaggacttcagtgtgacacctgcagagaaaacttttatgggttagatgtcaccaattgtaaggcctgtgactgtgacacagctggatccctccctgggactgtctgtaatgctaagacagggcagtgcatctgcaagcccaatgttgaagggagacagtgcaataaatgtttggagggaaacttctacctacggcaaaataattctttcctctgtctgccttgcaactgtgataagactgggacaataaatggctctctgctgtgtaacaaatcaacaggacaatgtccttgcaaattaggggtaacaggtcttcgctgtaatcagtgtgagcctcacaggtacaatttgaccattgacaattttcaacactgccagatgtgtgagtgtgattccttggggacattacctgggaccatttgtgacccaatcagtggccagtgcctgtgtgtgcctaatcgtcaaggaagaaggtgtaatcagtgtcaaccaggtaagaaagaaatgtattacattttcagtgcacaatgacattccttttgttaacttaggtaacttctccctgtttctggtttgtggcttctacaaattttatttccaaaatcattactgtatttatatcattatccaacacatatataactatttaacttattcaaaattatctgcatatttatgttactattttgagaggatactttagataaaactcagccgatcggatttatttcataattgagactcaatttctacacttgaagtaaatctcctttttaacagttttttaaaaatcagatcaacaagagtcaattttattttccagagaaaggaaaatttgagttgaatatccatacaatgccaaatattcaaatgatgaactaaatctctgaataaagctggctaaatgtttttgctgaagaggctatatgttctagttttatatagaaatacctagaattgtttccacatgccatcaaattaataaaataggccactgtttaatctcattatatacaaacttatctttccatctctttcccaattgggagagggatagaccccatctatggctctccttacatttaagattttaactaaaatactataccttctttacaataaattcattatgatatgatgataaatataagtacttatccgttgtttaacagctgtgctaattgttgtcctgtcagccaatattagctctgagttatatgggtctataaaaatgagcatgataccaactcaaaagtgtgatttgcttgccagagaaggagtagaacaaaagttctgttaacatagcaaagaatccagcctaggataattgggccatgcttttcctttggcattggtcagtgtgtaagatcaaagagacaagaaggaattgatgaagagttcattctttttgtgatgtaagtattaaaaaacaacttgaactggtttaaacataaatggagactatattataactagatactccataaaaacctaaggagaaggaccactgcagtcaggactcaggaattagaatgcttccactgatacatattcatttgtctctctctctctctctctctctctctctctctctctctctctctctcagaaggggactttacctctctctttctctacatgggtatatggccaccctatgtcccctgaaattgtttataattctaccaccagccacaacagagcgatttattagctacctcttagttataatttctagaggaaaattcgaattgactcagttttgtttggttggttacctctgagccaattcattgtggccaggggtgtcacgtacttataaaatgagtatagcttttagggaccatttcatcaggtagaagcaaggtggtaagtatcccagaagacaggaagattatggagacctgggcagacagcctaaatgacagatacagcacattcactctttttaccttcaggttaatcctttcaaatttgcaatcaattaactttttgatatcctaagatgagatgtttttttctcttttagtgtttatcaatatctctaattttggcaacaaagtcctttgtctcctacacagtcaaataaccatgatttatacatccttctttctaagtaaaccaaaacaagctaatagatcaaatgttatatccttttgagtaattatcaattgttaaaatttactgttccagtctaactttaattgtatgtataatacaagtcacatgttttaaacaatttttctgattttggaaaaactctgaaatcatagttacaaacatttgttccctttggtccttccaatgaaagacccaatccatcatctcaatactttgtacacctaccagatatctaaatgatgaactaaaattgttagaaaacctttgtttttctggttgttttgcatatcattgcagaaaaagccatggataatttaatctacaccatgcataagactgtctcatttgttcccttcctaggatgaagaaatactgacttcattgctctttcctttatctttgtggctctcattgtggtgatctctttgttcccaactctaagcccttttctcccacccaaatctatggctctttcctgtctaccctatatagtattggcagaataattcccctaaagcacttaattcgttatgtcattctcctgtagggttaccaaaaatgggttttattttgcttatcatttgagtccaatctgggcaaacctttatgagtttttatcttccagtcgcagtctagacacctagctttgcttcctgatattccctttctcccatcttcttcagtcactgcagccacttcactggagctacacatgtcacatgcagagccgatttcaatctacctgatgctttggttcattctcctttcccgacatggaatgcagtataatcctccttttcaatgttagttggcatcctctgactagttttactactcaacatactgcctaaaattctccatcactcagtgaacaacaaagttgacatgagcatcagtgttttaagaggtggtttaactcaaacctatagaaaacttgaaaataaggtgtttttgaaaatgtgctcaagcttctattgtcttcatgttcaatttattatatgaccttgaagagaggtttatgttcaagaaataataatacagatctcattgtaattaccccataattatgcttcttttttctgaagaccatatggacctataaatgaagtcaatgagttaagagtagggagcattaaacatggtgaaaatatttttatttactgaaaaaattcaacagcgtattgtaaaatatttagtagaaaatgtaccagactgagaaaacatatttggagctccatttcttcagcttactgactctctaaaggcattcccctgtccttctctacagggaacttccatattttcttccaactgtccatttctagccaggggtaagcagatttatctttaagctgttacctgagtggagcctgtatcagttctactcatatcctattgatcagagctgctttgtatatccatacctcactgcaaaagaggctggcaaatagatgctctatctgaatatcaaggtatatatttaaaacttggggcctcttttattataaggagtaagaaagagattgatccttgaagacagccttggctatactaggaatgtcctacacctaaaaaaattagctggcagaacattagtcaacttccgaatagatgcttttaatgaccatgagttttgtacttttattgatagatcccattattatcattttttaaaaaaatcagccaaagttaatgaaggcctcttgagtcctgaggaaatatatgcacaaaatcccttcttgggatcttcgactgtttcttacatgctttgccttatagactcactgctattctagtcactcttccttccaaggacatgctacagtttatagtggccctgctgagttattgacccaggatattaacctggttatgaaaagctagaatgatcaagctacagatttggattattatattttgttgaacagtgcagttattttcatatagataaacatttctcttactgagaaatcattttcttctgggtactgttgagttcttaatttaatcagagaacattttatgtgtagtagcaaacggtactttcagtgagcttaaattttgatggggaaactgacagaataatttgcaaataaatatatgatatgaatttaaatagtgatgatttttggatctgtggctctactcaattatgtttctttcttgctaagagtttaagatattatcgaggttaccaaatagactatttatttagcacttttatatcagtgtttagtttccagaaaggtgaactgggtagccatgtttatattgtacaagtgaagtcacattgatattttattgcaatggaaacagtaagtggtttaaaaggaggaatggtgaagtgaaagaaattatcaacctgtttctttttatattattatctaaaactagtcatttttctgtttttctcttttgcattttttctcatttaagatcataagtgcctgttttaaaaagcagcccaatgagatgaccttgttaaaactcctgattatttctcagtatcgtcaattaaatgaaccccttattgtgtgcccacaatgtacaaggaattatatatacatatatatatattttttttttctttttttttcttttgagatggagtctagctctgtcgcccaggctagagggctagagttcagtggcgcagtctcggctcactgccagctctgcctcccaggttcatgtcattctcctgcctcagcctcccgagcagctgggactacaggcctggctaattttttgtattttttttttttttaaagcagagatggggtttcaccgtgttagccaggatggtctcgatctcctgacttcgtgatctgcctgcctaggcctcccaaagtgaggaattatattattattgtagttatgcaagttgaataaggtaatccttgccctcaagatattgaaactttaacaagggaaataagacatttgcacaagtaaataaaatacgataatactttaaatgtgatcattgtttttcagtattagtgttgatgcccattctacatcttcctctaaagaaaagaagacaatttgcaataaacctttggaaaggagttttgttgcgtctgtacttaggcaaatcgtgactaagaagttattctcctaatggccgcacatggtggctcatgcctgtaaccccagcactgagaggctgaggcgggtggatcacctgaggtcaagagtttgagaccagcctgagcaacatggtgaaactccatctctactaaagatacaaaattagctgggcatggtggcacatgcctgtaatcccagctacttgggagactgaggcaggagaatcgcttgaacctgggaggcacagattgcagtgagcagagatggcgccattgcactcctgcctgggcaacaagagccaaactccgtctcaaaaaaaaaaaaacaaaaagacaaatatataccagataaagtcctccaaaaaaagagccaggaaaagagaaaggagaccaggagggggttgcatgaagaaaatttagtattattatccagtattgccattgtttaacataatttgagttttaatcaaaatttacatttgcataatttaaaaaaccaaataaaatgtaaagagccctgccttatcattttcctaggaatttccgtgcttagagaaaacaccttcaactcctttagatgtttattctgggctttcatgtctgtaattctgggttttacatatatttcaccttgatttttaaaatgtagatattatctattgtcttcctcctatagaagatgaatgtttagctcctttcacctcctgcttagcaatccctttatttggttaaatcagtattcagagatttctttattatgactatataaatttactgtacagctatgccatataatatgatttgactatattttctttgctcaaaaaatttgtcttccttagtttttcaggactctctttggcatttctaggaaacaaaactctccaagggaactctgttcaagaaatctatcaggttttgttttttcccactagatatatgagtgggaagttcaggctggttgatctttagttctgttgcacagctatatccaagggctaacatttgctgctatactagggatttccttcccctgtctcctatgttggatcctccatttcctgaatcctacacgttctctcttcttggtttatttgtgtatttggtagagcacatgttctagtagcttctgaaaaagaatacaaggagggaagtaatttgaggagaaaattttgaatatctgaagtgtctttattgtctacaagtgtctaaacataaagaacgatttgaaattttactattatatgaaaacttttcattaaaaaaatttaaatggttgtaccattagctgttagcaatgttaatcagattctttcttcttttctacttttttttttttttttaacgacctggaagtttttaccatctctatatccctgggcactcagtggacccttttgcctatcagtgatggttcttatgttctgagaaaatctgcaaacacattcatagcaacatctagactcatgttcgaccaaacagttggacaccaagcctagccaagttgatgcataaaatcaacaatcacaagcaacctttcacataatgcctgtttacatacttgttgagtccagactttctttagtttaacttctaaaggaaaagcttactgcatcttcctgaagtgtaagagggacaacttcctggttggggaaggtatttagcacaccttatatctgacttcggaaatctctggggctttcaattccaaacctttctgtctagagttacacaacttgaataaattagcttattgtcgggctctccactgcaagagcttagctttttcttataggtatctataattgattgtcatttttctccttctctcttttttttttttttttttttgtttatttcatctctggggatttcaggagggaaacattattcaatctaccatgttttactgacaatgttcccctagtgtttttgaggttttaatcttttcagaccaaatctttgcagacatccttgagccctctcttttccccacaacctttgtctcatctaataaaaccaattctgctgattttaccttcaagtatatccagaatttgaccacttcttgccacccttacttacaccagccaggtccaagccaccttcctctgttcctggactattcaagtagcctcctactcccctttatctttcttccatcacttctcaacagacagccaaagtgatgctgttcaaacttgagtaacatcccatcactccaccttccatttgcttttcaccatagctaataagaaacaaagttgatattctttaataatcctcatggtctataatgtccatgaactctctgacctcatttccacaagtcttcagatcatttcttcctctccagccaacaagcctcattgctgtccttcacaactgttcaatgctctatctcaggcaggtataaaagtacctccatagcagtgctccctatatattttctgaattaatggataattatatttcaaaaatacctcagtggcattctcctgtttttaggtgtgagcctagcaaaggtctgtggtgtttttttcacaacacttacgaaaagcgttgtgttcaaccttgcaaatgaggaaaaataacagtgacctaagtatcatatattttttaacaaaacaagatatagtctgcacatattcatagcccacgaaaagagcaatgtgtgctttggggtggacatttttttattttttattttttattttttttgttttgcttcagaaattccactttaatgtttttttttttcctggttttatggtctcttacagtaaaacttgcattgaaaagagaaacccttatcctgaagtatctttatcataaacagatgtttgcagtagccagccctgcaatgtgcacagtaaaatgtgctgctacaatctgaagctttcatttacttatttaaacatgtctgagagacctagatcatataccacaggggcagacagcatgctggtgtgtgagcagtggggcatggagggagaaggatggggtaggaagggatgagtagcaagcttaaggacttctgcctccctttcatctgtgattgcaaatactgctgacccatagtagatgactgcacatagattcttgtcccactttcctaaaaaacattattaaggaaggtgcatgtaatgaaacctcatgtattattaacctaaccttactacgaatgtacaaggaataggtttaattcaagtaaaatttataggcaatttgttaaagcagcagtgcacattagaaggtacattagagacacattggttttaatatgccattcaataacttgaacagaggttaaaaatgctgcttaacctccattaagtattttaaaaatgctttaatttaaaattatttggagtgtgtgtacatatatgaatgtacacatatccacactaataaatataacactaaatatgttttcccagttccctttttcagtgctggatgaccttataatgttcagcagtaggcacttaatcagaggccaggccgaggaaggcagggaaggatgtcaacgcatcccgagccagtgacccacccttgtccttgagaactagaggcagagagtgcatattgaagactctgtagctttggaataaaacaaaggctaatttataatgaaaacagcttcctatgacatgttttgtactaatagggcagtgcctcctgcttccccctagtatttacttttggttttcttttacaattcataaaacaaagtatcttgtttcattaagtagcacatcatatttattaagtaatgagctcataaactagaattgtgtacaagaccctgccaatggaattggaatcagatgctgatgttccattaaaaatcaatgcatcaaagttgatatccaattatgccacatttcctagtgtttggtgagacaactttctaggttaacatgtttttcacagagagacctgaatctaaaagtaagaacctcttccttgataaatcatcaggaaggaatcttgtcacaggaaatacagaccacaatcttaggtacatctggaaaacaaaaaaaagtaaaagacactgataagaaaaatttctctgtcatagaaaacttgctaattgacaattacaaagatgataatagataatgtttactgagagtccgctgtgtgccaggctctgtgataaggttttgcctgcaaactttcatttaatatgcacaatatttctaagatggaggtgctgggattattctcattttaatctaattgggggaatgaaatctaattaagtagaagagccatttataagtccaggtccatctgactccagaatgtatactctgaaagagtggaactttttctttttctttcttttttttttttttttttttaagacggagtcttgctctgtcgcccaggctggagtgcagtggcacgatctcagctcactgcaagctaagagtggaactttttctaaataactaactcaatatttatcttacacattcacacaacaaatatttgagggtgagttagataaatactgtttatttcatccactttcaagcatacctcaactcatgattctggcttactgcttcacattctgggatacctcatttgttgttcaaaacccaagtagtaggcataaaatgaaaattaacagagtcctgggaaaccacagagttcaaataatgatgaggtaaattgaaggggtctagaaatggaattatctccgagaacttagttggagaaattctggagatggttggaatggcacaggagacaggctttagagcatgcatttgataaacactgaatgggaacagagaatataagttttgctgtggattttgaatatgcatacacatacatatattaattataatctccaagatgtaatcagagttgtcattatttgggttatttgttgttattggatttgattcttagagaatatgttaatgagggcctttcatgggtattcacataaatagaaaaattggattatttatgaaacagaaaattccaataatgttttcccttacatgagcatattattatgtcctttgtttaagagctaagatatagttttagggtgacattttctttctgcagctctgttccatctgttgctgtgacgagcactatattttaaatttattgtgtctgatccatatacactcctctctagactccctgataggacaggccactctgaccaaccactctcatgactcacagatttatgtttaccattttccttttcagtgttaaagggatcatctcatattttagaggatagaagatatttatccatctatccacccattcatccattcagctatctatccatttcattcatacatctgtttttcaataaacatctattgagtaaattaccagagactatgttggtgttaaggtatacaatcacaaatatactaagacattgtgatttagtaggggaaactgactcacatgtaaatgtatcacaatgtgatgagagccatattagaaatatacaatatagagaagtagtaaagtgaaggaaatgattaattcttgaaggatgaggggtcttaggaacttagagaaaatgatttctgaactgacttttaaaaggaaataggaatcagcaagctgctcaagaagggagtagcagcccagaaaaaaaaaataacagcagaacatttaaagcatacctaatttaattgaaaaacccttaaaaattgttttaaaaaagagaaattataccttgggatgaataatattaatatttatgtattcacttgatcaagtctagaagtaattttagcgtgattttatataaaactaccaaatggaggaaaattattattgttttaatttgaaaactaccatcatcaactatactgaaatatagtttacaaacaatacaacaatattgaaaatattgattcataaagccattaccaagatagtcttttgttgcatggatataggtgagccacccatccctccccaggctcttgtgtaactattatgtccattttctgccttaaggtgagagtagtttcttctaaatgtcttacaattagtgcttagccccagcattgccctcctttcttgaataaagcctagaggttacacttcttttctttctccctctcaagaccttggcaaagcctagttgttcatggtcctcaggagagacattgctgggaaatgggctcttcttttatgcccaggacaagtactgtgctatgcaaatagccgctgcaggagataataccagctgccttgctaataactttgaactctgtagattcttctcctaggcaaagccacactattttacaatatgggtgactctttgttttagctggatgatacatttttttccacttgagatttgtcatgtctaaaaccaagggtcagctaaataatatgggaaaataataaactagcgagctgatttggaccatgtatatgtgaactctcagcactacgtaatgcaaggtaataatgttgtcctaatgaccatgcttaagaatgtggtacaaaatcattcatggaatgaaatctcaatatgatcagttacaatgctacagatatataaagatttggaacatgaagaagagctaacaaaggggtatcagaaatgcattacattaaagtaaattgaggtcagttataattaagccacattcaggagttgatgtttaagtggaagggaagggaaaagattgttttctatagttggaagtcataaaaggaggtaatggtctagaattaggcacattcaggtaaggcaagaggtaatctttaagcaggaagttacctgagtcatcctaattagaactgcttaaaaataggacagctaaaatactggtgggattaacctttataatcaggctcctgagaggaggaggggaattaaccccaaggcaaattcccatgcagtcttttcctggaagccctaccttcactttcagtctccctaggtgctttagcatctttttagttcttctctgcttgtacttctgatttttctgtgacattctttattccccaaaacttggactacccaacttctgcaccaaaatgctatcccctacttgtacttacaggtttatctaatacatcatttcttctaaaaatcacccttaatttttccaaattctctgtggcttggagctattgcagtaagtctaaattaattctacttgtaagtatctgtgctaatgggtaatttatccaaattggagagctgttagcacattcatgatgccatcatcatggatttaagggcctagataccttcacaggaagaaaaatacaaagaatcacaaccacagtggccttgaatttaaatggaagccttctgaatttgactttgatcatgtgatgaatcaggtacaagaatatatactaattgtcatggccatgctctatttctggatatgtatatataagggaaattgctgtcaggtggtacaaataaacaaatagcgtaacctggctgtaaattatgataaaaatgatagtattagttgatttccgccaactgaatggcacatattttgagctctttcttttcctctcattgagcacaatgttttctattttgctgcccttgaaactttgtaagacagaatgtataggatctaggggaaggaaaaaaacccaattgttggtaactataagaaaatggcttgttttcaacaagagcctggaatgagttttagagtatcctaattactttttgctgttccctatataatagataagagaatagattcactttttgctcatgctctccttctttcaatatcattgctattttatgaactttaaattagtgtcatgacaattgtacaattcatttttatttgctgtaactgtattcattagaatccttctgtgatccttctaccccattgtttcagtaaaattctttgcagcattttgcacgggcttgtgtgtgtacccatgggtctgtgcatgtgtgtatatgtatatgtacacatacatgaacacacacatcacacaacactaagaaccatttctccctcatatgcctgctccacattcaactgcctgataactttctaattctataacagttaacttccatctcctgggtctgaagagattttaagtaatttgaataaacttttgaatcatatttgtatttctttcctttttccataagaaaaaaaatatgagttttagaggtaagctaaagtctctaaattctgcaggctttttttgtgtgtgtactacttgcagggctcacagcctgtttaataattgaactcatttttatttgttcatcgaatgtgtttggaatgcctactatgtgccaagcagtgtactggctgctagggagacaatgatgaatgaagcagatgggttttctgcccttatggaagttagattttggtggaaatgagattgattataattttcatgaacacttaggaaacaaacaggatgctatgcatttgtaacaggtatacctagcctggcctagggaaagttgcctgaggaagtcacgagacctgacttacatgagtgaactgagcaacagagataggtcaaaatcatcccagcagacagaacggcccatgaaaaggcctttaggtctcaagaagaggaacaaatatgactgcaatggactgagcggggggatgagccatgagctaaagctagagacgtagctgggacctgactgtaggattgaaagctgagtgagagatttggatttatttcctaaagggaataggaagtcatcagttagtttcaaatagagaagtgaaatgtccaaactgcactttggaaaaagactgctacgaagaatagattggaacaggacaagagggatgcaattagaagagatggcctccgggactgggtggtctgggtgtaaacctgggttttgctatccattaactctaccattttaggaaagtgtgttaaccttctcaatcttctgttttccaattgacagaatagatgtaataataattcatgcattatttgcatttctatgacaactaaatgagatgctcaagataaagcccctacagtagcatctagtttgaagtattagttataaaaaaagtggttggtgactttatctgggaggtcgtagcggggatgaagagtggaaggtttaaaattgttaggaggcaacatccataggacttggtaattagcaaaatatagggggtcagagaagtggaggatgcaagcttttgttttagtaaaatacagaattagtttaatttgaatttcagataactttttttagtctgagcaaatgctgcatgggctgcacctttgctaaaaaatttcattatttgttagaaattcaaatgtaactggcttcctatattttataagtctgccctaccaaaggtacctcagtgttctaggcaaagcaactgaatgactggtaatatctgttggaatggagctgattagaggaggtcaagttttttgtagaaatattgaaatattgcatggtagattttaaatacattgaattgtaggacctgggaggcacccaagtccaatgtagataatttactcagtttttctttggtcataattgacacactgaaggacagatataaccacatttgtattgggaattagtgccttggtagagtattctgtttttctgtgtaatcaattattatgctttaaataaaagagtggataaaaagtatatataaaacttttaatttctttatttctaggtttttatatttctccaggcaatgccactggctgcctgccatgctcatgccatacaactggtgcagttaatcacatctgtaatagcctgactggtcagtgtgtttgccaagatgcttccattgctgggcaacgttgtgaccaatgcaaagaccattactttggatttgatcctcagactggaaggtacatctttataagctttaataatttaactctttctttagcaacagttaactttttttggcagttgcaaagcaataacttctgtaaaaagtattttttttgcccggcttggtggctcacacctgtaatcccagcactttgagagaccaaggcaggcggatcacgaggtccgaggtcaagaggtcgatatcatcctggccaacacggtgaaaccccgtctttactaaaactacaaaaattagctgggcaaggtggcatgcacctgtagtcccaactactcagaagtctgaggcagaagaatcgcttgaaccgggaggggtaggttgcagtgagccgagatcgcgccactgtactccagcctgggagacagggcaagactctgtctcaaaaaaaaaaaagtgtttttttgttattgatatgttttttgttccgtgacatccacatttacttaatgtatgctaatctttgaatatttcctagagtgggttgctatatattgatagatgtggcccatcctagcatctgggaatgttgaatgagataaaatatattttctctcaaaaagctgagagtctggatgtggagaaagacaggaaaagacatatctgaagaagaaaatacacatactcatactttctctctctctctctctctctctctgtctctctgtgtatatatattatatatatatattatatatataatatatatatatatatgggatatatgtatgtgctttgttcttcattgcccttgaatttattgcatatttattagttcattgcatctatttatattttccttgcgtttctaatttagctttaaagactggcagatgagaaacatagctttgtattctgtgatatgatttttttcagtatgtaaagtatattatgaaagtaaatcatttttcaaagttacactctctttaatattctacttcttattctctgggtatctgtggccatttgccttcactcatttgtgtttattgctgtatttttgaagatgtgctataatgccaattctgtgtctgtgtgtgtgtgtgtgtgtgagagagagagagagagagagagtgagattatgagcttgtctaaagttcagactaaatctatgaattctttgaagctcctatccctgagaagctagtagtgtgtgctgaactcagaaagcatgtaataaaatgagtcaaatctgtctctcaatatgtgtatatttataaatctaattgctaattatttcagggtttgtgattatctgggctcttttaaactcattgcccccctgctgcctgccttttggctgttccactcctcattaacacctccattagagggtggacaggtgacagggtaattactgaaaaagaacttaaactagttcattttgactttcttttaaaatttgatgtgatttttaaaaactacaaaaatcatttaaaattttattaaaataatttttgttttcttgacatacatgcatatattttaatctgtgacgctctacttctatcaccgtagaaatgttaccttgatggtctgagaccattgtgactcttttctacagatgttattataaatcatctaaatgagtatacaaagcgcatggtacagtaaatagtaaataaaaagcactgtcaggattttgatagtaaaataggagccagttactgcacatactagctcctagatgtaatttttttgaaataatattctacagattccccagttggaactcttgggctggtttgtttcactcctggccacctctgtctttttcatagttctgaccacatttaccaggagaaaaatatcttccccaacccactgtcctccttgcaacactcattcccatcagtgccattttgtgacattcaattacccatttttgttctactcatcccctttgtcagtcttcccagggttatcagcaaaacgcctgctcagtgacctggggatgtctgattgtctcagctttttcacttaactttttttctttaagtgagatctgattcccttcattacactgcttcctctaccctacaatgttcttaaattcgtggctgagccttttaccccattctgttcctctcccattatctacccatctcactctcactccccaccttactttagtccaggaacaagaattgcttaataagtactgttccatcacctgtcactctgcagtaggcctgactagcactggagctagattccctgggttagaaggtggatttaaatgtttacataaattgataaggaataggaaggaccaaagaagtgggtataagctacatttttagaagataccgaagttacaataaagaaagaattcagtctaggcactatggctaactcatgtaatcccagcactttgggaggctaaggtgaccagatcccttgagtccaggagtttaagaccagcctgggcaacatggcaaaaccccatctctgtaaaaaataaaaagttagccaggtgtagtggctcttgcctgtagtcccagctacttgggaggctgatgtgggaggactgcttgagactggaaggtcgaggctgcagtgagtcaagattgtgccactgcactccagcctgggcaacagagcgagaccctgtctcagaaaaaaaaaagcaaaaaagagagagagaaagcagacttcagattcgcaaaaagaatgaggggcaggttggagtctagaaaatagagctaaagtatgagaagctgagtagatttctaaaaatatgaatgattcagattaagtgtggggttttttttttggacagagtctcacactctgtcgcctaggctggagtgcagtggcgtgatctcggctcacttcaacctctgcctcccaggttcaaaagattctcctgcctcagcctcctgagtagctgggattacaggtgcatgccaccatgcctggctaatttttttgtatttttagtggagacagggtttcaccatgttggtcaggctggtcttagactcctgaactcgtgatccgcccacctcggcctcccaaagtgctgggattacaggcttgagccgagtgtgtgttttaaacaaaaagatccacaagttttatataaatgagtttggatatctttacatattagttggctcctgttatattgatgggggtggtgagattacctttttaaaattacaaattgtccttggaaatggtcgcacttttcttccatccctgtattagtccgttttcatgctgctgataaagacatacctgagactgggcaatttacaaaagaaagaagtttacgggacttacaattccacatggcttgggagacctcacaattgcagtggaaggtgaaagacacgtctcacatggtggcagagagaagaaagcttgtgcagggaaactcccctttttaaaaccatcagatatcgtgagacttatttactctcatgagaacagcaggggaaagaccctaccccataattcaatcacctctcactgtgttactcccacaacacatgggaattgtgggagttacaattcaagatgagatttgggtggggacacagccaaaccatatcaatcccctttgttcttatctttccagttccaggttttccttttcagagggattctatttttctcccttttctaactcctgccattattttaaactactttgacatgtactgatgcagttctttggcctcttcattcattccccactccagcaacccatttccatggctacaccctggattttgtgatcacttataatttctctatttctcaaatcttcctaatcccatgaatgctattctatggatatatcacatctttccaattccaattcaccctggaagcctcacataacctgctccttaacttctcttaatctttatcccattatccctccttaatcctcttttgatcaaccccatccctaacttcactgtcttctacttctagcctgaggcaaaacctttttaattatgacccttttgagtacctgattgtgggctcccttctgctgtactgtggggtcagctccagagacgatcaccctacacctgccctgatctgtgaggacgtggggaaagatcatgtgcctatgctgatctgaagcactaccatgtatgtacttcttatcaatttactttctttccccctttaaactcctaccagtctcctcagttttaattccatgctcttgcccttgcagataatctggccctctgctcatagacaaaataaagccagatatatgtatctccagattatcttttctccacctccagcttgtctacattgtcacacatttttaattttttatctagtcttagaagaaaatcctgtgtatttttgcctaaaaataacctgttcccagtccttgatatgatcccttcctgttttcctactcttgttcctccattccatgatctttgctccatcaaatcctccctttattttaactcaaacatctctctataggtaatatcataactgcctacaaaaatgctattcattctacaaactccttcctttgattctgccctgctttatgagccctgaaagttattgtctaatctctcactcttcattcacttactaacatttaaaaagagcactatgattcaagaaaacatgatttaaaaaataaaagatcagattttttttcttcttcattttgtttctttctcattcattctttattcaccatgtgtggtacatacatgttagcagaacatacaagttagcagaacttgcaacatgcagacattcaagaactagttatgtgactattaaattctcatccaaatcaaagacaaggtctataaagagatataataaacaaaaatgggttaaggaaaagacagaatgagggaacaggtttcactggtgggaaaaagggaggggtcagtggtgctttccacttgagtccagtgagaaggtcttatttgatcccttgaagggtgacatgtgtctcctgcagttggagagaccagtgcattgatatctatcttagacctggcaaatctaactgagaagagacagtctacccaggtttggataggtaagctagaagacagtgccctgcatatcttagactcccagagttcatcatgacaaggaagactacgtatttctcatgaccggatgaagaccacaaggaagaaagacagggtaaggttgtcttagtctgtgctcaaagtaccacttagaagataaaggggcctgtgtagaataaaggacaagattactgtggactacaggttaataagcaaccagtcgaaaagaaaatgcatctgactgcactaaaacaaaaggtgagagatacctaatggtgagaaagatcaatgaagaagtcaggaatgtaccactgtcagtgataagtcagttttatgtatatgcaggaccagagacaatagactgctttgggtggttctagtccaagtgagtttctacccttcctgcagcctctacgtgagggaggaggctaaccaagctaccttctctgattatagacttgctgcctttatcatgtcctagcttgatgaaaggaagagaagtatgttcttgaaaatgtctgttctttaaataaagattggaatgttgactaatatacaggattagactttctattttctgaattgaatttgtattttgcaatgtaaagtaactgtaggacattctattgcctgagaaagaccagaaaagccaagtgactaactcattttatatccacatggaacatgggggaattagctccatattatatgtttaaagggtcagtgaaagacaaaaataaaactgatttatgattgcttctcatgacttatggtttctcaatgtgctggtcatttcattgttcccatttatttcttaaaattacctcttcctttggtttccaagattctacttctcttatttgttttctaactctttttttggctactcctttttaatatgtcctttcaatttccacaactgtgtccctgatttcaaccactacatacatgttaatggctttcaaacacatgatcacccattcagatgcctgccacgcactctaggcctgtagccagctgtctctctgagttttacgcttgcaagtccctcgtgcatttcatttttaatatagtcagcacagaactaaccattacttcctcatctccacccaaataaaaataagtcttatgccatctcatgctatcatcatcttggtgaaaaagacgtaaaacttcaaataattattcaagtccaaacttcccaagtttgagtggggcttagattcttctcaggtttggcagaattggctctgttgttgagtagaatgagtctacaggctactgctggaaagtgctatggaaagcaagagctactgtatataatgcagcttctctaaaaagaatagaaagaataaagcttcccatggccatatgggacccaaggagatcagcaggatttgtctcttactaaatcagtcgtgtggaatgctggtaacttgacttgaccctcctatcccactgatgaattcagctgtctcttttcacttcaacattgataatcattacacaggaaatcctgtagcacagaagggcatggagaaggatattttaaaatgtgacaatgagaattgcttgagtttggacttttgttcaacattgaaaagagataaaagtgggttctttttaatgtttttccattcctcttttgaatgataccgttcttgaatctttttttgacttctggttgttattgtatatacaccaacattggctatattgaaaatgtgtaacaattgactaagatatatgggattccatcaagtataagaaatttttgttttttaaaggaaaaaattcacatgtaatgtaaatatatacagatatgcagtataggaaaacagctatgtcctaatgttaaaacaatgtttttgaaaacaaagtagattcaaaatcatttgaatctactttgaaatctaggcactgtggtaggttattacaaatagaaatgtttacatttataaaaattacattccaattataacaaatggaaattaaaacattaattttcaaaatatacagtagattataagtaacttattattatgaaaggggaagatacaagtatcatattatttcttcatcaacttggaaaataacctcacttccttatctgcctggttcacatattccttaccttcttcatgctctatttgttggatatagcaaggtttgctatattgttttctcttggtttatttgctacacagttttttgtattcccaagggcaaaataaataaaataaaatagacctcggccctaaactacacaaccaacaacaaaaatccaggcaacacaacaatgactttttgtgaccaagctggaaaatcatttgcctgtttccatctaagtggtttattcttcaaaagttactgaccagaaaaagggggcatgtattttaaaaagctgatcctagtgcaaacattactccatttacctctgacacataaagcaaacatgatttaatcagtatcgaaaacaatgaagcaaaaaaaatctgcccactgaaaaatcaataatgcaaaaaagtatatagtgtttgtctaacccaaaaacaatgagacaaaaatgggccatatttaattcatctcagttggtagtggagacccatatttgacaccctgcacttactggcactgtcctcaagttgacctgtgactatgactactctcccccatagcccccaggactgctccagttcatctggtaccccacagttttcttacataacaaccacacatcacaacccccaaaagtttcttccctaatgatataccctctctatattctatgttaccttgttttaagccttaaggagttagtggtatcactatttgtcccatttactagctgacacacactgaagttgtccatagagggtaggacaccaaggctggttagggagaataaaggctcagacttctggagcataaaatacagggaagttcttctatgcccagattatttttggttttactgcaaatgttctacatttcagcactaggttatagatttggtccagtaatcttttcacaggcctttatccgattgatctcaattggtcttttctctgagaaccaggtcaatgacttcagatgaaagcagataacttccttgtcaactgatttccttttatggtgtgataatggaaaaattagggagtgtgcctcatagattccctctcctcagtgactctttgtcagacagctggctgtcatctggggtgacagggtaaatgggccacaagcctgtcatcatctggcagccaaggcagggctttctcacaaggcagtggcagatttccaagaaagaaagcagaagcatgcaaagacacttgaggcccgaaccgtcaggatgttacttttaccttattctactggccaaagcaaggcacgaggcttaaccatgtttggaagtggtggggaataaacagactctccttttgatgagtagaactaattatacagttagctgcaaaggacctgcacagagggaaaggtgaagagttgtgatttttgcaatctcctatggctgccaaactatatattctctcttagtatagatgatatatgatctgataagaagtatcagtttttatatattagtagcatttattcaacgtgatgtaataggaataacatgcaactggacatcaggatatccaggtttcagttttgtcttttccactagaccagatacagtagcttcctattattggtggaataaattatctcaaactcagtggcttaaaacaacatgaatttttattatcttatagttctggaaatcagaggctctaaatgagtttcactaggctaaaatcaggcctgtgtttcttatggagattctaggaaaaaaaaaaacatttccttgattttcccagcttttagaggcaacctacaatctttttttttttttttttttctgagatggagttttgctcttgttgcccaggctggagtgcaatggtgcaatctcggctcaccacaacctccgcctcctgggttcaaatgattctcctgcctcagcctcccgagtagctgtgattacaagcatgcagcaccacccccagctaattttgtatttttaatagagacagggtttctccatgttggtcaggctggtttcaaactcccaacctcaggtgatctgcccgccttggcctcccaaagtgctgggattacaggcgtgagccaccgcacccatcgtacattctttagctcatggctccttccttcattttcaaagccagcagagcagtgtttccttggacctctgcttatgtccttacatgttttctctctgactcttaccctcctgccttcctttataaggaccgtagattacattgggcattcttggataatccaggataatctccccatctcaaaatccttaaccacatctgcaaaattccttttaccaagtaaggtaacattcacaagtttggaggattagaacttggatattgttggcgtgggcataatatgacctgctctaccagagttcagcaatctatagcctgggggtcagccacatgtttatgtaaatagagttttattagagcacaccaatgttaattctttacatattttctgtggttgctttcctgctacagcagcagagttgagttacaatagagctcatatggcctgcaaagcctaaaatatttactatctcatcctttatagataaagattgctgaccttgtaactagatttactgtcaccttggacaaattagtctcactaagcataatagaatcataactttatagactgggaaagaaccttaaaagtaattttggttaaactctaccctatacatttctctgcgtaaatcaccttttcagaaaaactggtgaatggccattcagcttctgctccaaaacatggaactaaaaggagctcactgtctcatgaagtagctcatgtttatttcaaacagctgtaattcttcaacaaatagaaatatattatttatattgaccaaaaagttgcagtcttttgactttcttgcctagtcttatttatgccttctgagaccatagagaataagtgaaatctctcttctatctgtgagcactttaaaaatttgattctgctatcatatctgaaagttatttagttatttgcataaatatgtggagtgtcaacaaaggagaaagagacagtgttctcagatcagaaccttgctgagcaagctgcctggacttagctgtcactattgcatggatgcaagggagtcactgcccctggtccagcttttatgagtttctctatttgtgcctgggaaattcaccaaagagggtggggttgcacactgttaacgtctccctttcagatgaggcactcgtatttccttgttcaataagccatgtaaatatggctttcagttcacacagcgtggatgcccaagcctcaaatccctctcctataattctgattccatctccaagagaattcagatgctgttagtagtctgtaactaaagcgaaactaagaagctcaatgaaaccacagctcctctgttaatcggggaaaaccaaactcctctagagggcactgtagcactcaccgaattctgtgaactgagaacactggtttaagagaatctgaacagataccagctcttaaagaaaactgtccattccctgggagtgaggttagccagggggacagagttaagccaataaaaaggggctcaaaagagctaacttgttactagagctacaaaccatgtttggattaatctccggtgtcctatcctaagtctaaagcttccctggtgctttattcactattaattcctgtatccgacaatatttactgaatccttactgtgtgctagcctttgtgttagggactgatggaaaaaactaagacaaaaacaaacaaaaaaactctgccgaatttctccaatttgccttgaagtctcattctcttttgtttattaataatccttatctaaaatcccttagcaattggagatctctttctccttcgttctttatgttgaatgatgtcttcatcatccccattagcaagttagaagaccgggagtaactttatacctatcctcccttctcttttcaattcggcctcccattctaccaattttacttaacatttctcaggtctatcctactcatttccattgctccttgccactgccccaaggtagcattatcttacttctgctcacctttccaggtttatctatcaccatttctcattatgaatttacatccaggagtactgaggtgcttgcaatttcataccctcttctgctttttcttttttttctctatttttgcccctccccgacttccctggcttatttctactcatcttttaacgttcagcccaagcatctcctccaagacttctacttaaaattacccttcccatcccttcttctgctaccagactagttaagttgccccttttctggacctttagagtctggatacatctttattaatgctgtttccgttttttcttgcatacgagattgtgagctccttgaggaccggggcaattctataagattcatctctacatccttgatgtttattccagtcctggaacatagctggccctcaatgaatgttatttatgtcaatcaatatttaaatcaatttgatagtacccatgagctgaggccccatagagaggaggggtgtacaaagagaaatgtcaataaattgacctatatatcttgggatatatctctgggcctcctacagcagttctccctcagatgatgaattttctgacaatgatgtgcattactgaaacatattcctttcattaatagttaggtttcaacagtaataattaggataaccatttctctcactgtttccacaactggaagaaattcctaagaaaggaaggtatatgaaatttgtgatgtaggagacagaggccaacttctttcccattgtaaccagcaaatactgagttatgtaagggtccaaagagaactatcatagcaaagtgctggcagagattagtgatgctttactcctgttttgtttaccataatgaactggtcaataaacatcacaaattgtttatctatataaatcttgacagattactctttatgaaatccatttagcaagcgaggttttcccataaggatgaaaaatgaagattttaaacagattgcgggagaagctctggctgtaccaagagagtcagtgtaataaaggtttctttatattaatattacaaaaaccatttatcctggcaaaatcaatattgcaattcatcttagtttggtgtttctctttctaagcttaaaatgtcttttcctttattatgtataattttgttttaataaatgtgaaatatatttcatttaggaggtactcttgaggagggataacttataaaatgacatcaaatttgtagcttatttgctaaagagtcttggaagtgtttaaaattatatttgagtggctgagaaatctaaaggaatcattttgcttaatccttaattacaaaattatccctgtgtcctttggggtaaaaacaaactacaattttcagaaaagtcttcgcttgtgaacttcatttaggaaaaattctctcttactgaagtcaagtgattataacaagtcagataagttgactataacaatggcttggataagagactataaaatcaagaatagacacatttaattgctcaaaacattgcgtgctttggctggaagaaaatagaactacatcaaggaacggaattatgttatacattggaagctattactctaaatgtactgtatgtaaaataagtgtgattgtctcatgagtgaatggtaataaaaactgaaatactcaagagacacttattcatgagtggtgcagttacacatacatatatacacacacacacacacacacatacattgagagaagcttttctcttattgtttatgctcactaatattatattaaaagcctataaacaatagactctacataatagcctataaagaaattaagagcaaatcaagtatttttgcatctataattccattttaattataatacataattttcttcagctctaaaacttaacctaaacaaaacatctatttgaaatggaattctgatgtaatgtgtatagataaaagacctaatatagttgtttgaagggggaaaatgtccttttatcatgaccataaaaacggcaaactacagtacagtggttttcaagaaaaactgtactttatttattcccaaggggatattagtccataaaacaaatttgcagcttatttggcagtcttagcttttatcagcctttttaagggtgttgaatgattacccaagagatcacactgtaaaaatggcagtggggaaaagtaactccatccgttcagcatctttattagaatatataggtgaatccatttgatgttgttttaaacgtaccacaaggagagtaccttttaaatggtgagtggtcttcttacatgtgctgttttgcttctctaatacctcatggcaccaacgttgcttatcctaattagtgccattggcataggctacatgtttgaataattcactgtgaagaaacaagttttagtttctatcatggcaaaatgccactactggtatttttacaagcaactttgggtccaagaaatttaagttgcactaaagttatcttactatatttatgtcattagcatcttttcataaatcagaataatgctgtattctccaaccattatggataactaagtttagttcataaaacagaaaatgaaatataacccatattaaggcatcaaaaatatttgaacctgtctttctcaagcaattttcttagtgaaatttagtcttcatcgaactaactatagaattttaagatttttagggagagcaatgatttacccctgattttctatttcgcaattggagagtcacttgaaaagataattttatgggtacctaatctaaatgtttagctgacaggaacactgcttttgtaaaagcaaaatttacagcattcttaattgaacaactggattcaaactaatccataagatatattgtgggatgtaaaaaagcaatataatatctttttttgctattaattagtttataaagagaaagctttatacgggttttaccaggaacagtagttttataaagatcttttctattttcctttattttatgttgattctttgtttgtttagctcaagcattcttttcaatatattggctaaaacaagccgtcttactctacaatgctattggtaggtgtaacttatactatgaattattaatcaaaacactattctctttgatggtttatttgccttgttttcagatgtcagccttgtaattgtcatctctcaggagccttgaatgaaacctgtcacttggtcacaggccagtgtttctgtaaacaatttgtcactggctcaaagtgtgatgcttgtgttcccagtgcaagccacttggatgtcaacaatctattgggttgcagcaaaagtaagtgaactctggttcagtgctggtgtgtgaagcagcatcatacaggggactgcatctcattgttttctttctccatttagaacccatcagaaaggcttagtacaatgtgaagaacgtaggtaagagatggaaaaaaatacactgaatgaaatatgtctgcttttccttgattagacaattggaaatggtaatataattatgttcatggtgggaaatttacaatagttttttggagtgaaatcaacaatgaggtgattaaagtcctaggttttcccagaccaagggtcttcccaggacacaagacttttaatggtaaaatcaggactatattggttaaaccaaaacagttggtcaccgacacaaagacatttccaggtaagttatttttttttgacaaataaagggtgaattcttgtttattatatgtttgatattcttccatcccccaaattttgtgggcagtattataccattagttgtttatcgatattgtaataattagtatcattcgtcacgcatattattcatcccataattcatgtttctttctactttaagtttcactcatttaaatatctctcacatttatatttttaattccttaaagcctaagattacatgtaagtatcttttgacttttcaacatcgcttttcagtaccttgaattgacctcacaaggtcacctgcagttctacaatttcataacatattgaccgttttcctatatttacttcaagatcatacatccttaccctttccagaatccctaagaaatgcctgctgggaacatgtggtaggagccctctacaacatattgtgctatgcatattctccttggggtgtcctgagactgtcatgagtcacaatgataggaaacgccacaagtcatgacagatcatcacaaaccagcatgcctggaactctgctatctacatttaaggggggagggagaaagataagtaatgggatattggactccacaacaactgtactagattttgaggtaatggaaagcaggatatagctagtgattaagaagacgtattcatattttgtacctgtgtagtttctcttcagcatcccgcatttcatcagtccctctggatttcagtataagtaaaactgtaggtatttatgcttcttttgggaaagaactgtcataattcctttcatgtataaatacagtctaaacataaatctggacttcattggccacttaattactatgtgtcatttattgattagcaatacaattgattgctttgtatgcaacaaaaattctagcatattccttttggatatgagttatggatcgtcatttataatggaattacaatacctaatcttagtgatttctgattggttctgccactaattttgtgacaatattggcacctgctctactttttgctacctattccttcttgcatttgagacatagtctgggaattatctctcaggcaaaactggatagtcatgtcactggaaagctagcctacaactcttagtagtggtagacatttaattttatgttttattaactggacattctttccaagtgtttctgatttgttagaatttttaaaaactctcacattcctaatgattcttccctggacatattccttttggttttttatctctttaaaattatgatatatcatactgagcacagttcttcaactcttgtggttgttgctgcttctgttttaggtttttatttaacaaaatttttgaaacactgtgtaaagttggaagctcagcatcagcagaggcaatttattagaaacaaatgagacaactttcctgccttcagaggaggtcaaaacatagctagagtgatggacactgataataggaggggagcagaaaaatgtaaatggtgggatgaggatgaagggtcccagccttctctcctgttccagcttgattttcacatggtacttgtgtttgatcctagcagaagccagccagaacaattggcttcacaaagatatgatgaaattgaaaggaatgtagtgctatctattgctgacacagtgaactacctctgactagtatttgtctctgtatccaacagatgtcaagaaatattttcatttaaaattaaaatttctcatggtaccccaccccctacacagtttgggaactgcaggattataaccctcattatatcttctaggggccactagcaataatttagtaatatcatctgtgatttttatttttggtgggctgtcagggtgggaatcctaggatgtaatttccaaaatgcaagaggattgaatgaaaataaagtagttagaccttttcttatagtaaatttcccttttgggtgattcacttctttcctttaaatattggtatcatgctttcaaaatgatagtcattcttcttgataggaagcaaaacaagaattaacataaattaaatagtcctattttctgtatgctttcctagcgaatgatattctagttagttcaaccatctatgaacctaactaaaattatacacatacacacacacacgtatacaattagccacttattgtttgatagtgtttgtcttcttgacactattctcattgttatttattcatctttatatccacattttttctttatctctccttgccagagagcctcttctagctctccttttattaacagctttattaaagtataatttacatattatatatttaacaattttaagtatatggtttgatggattttagtaaatttagacttgtgcaatcattactataatccaattgtagaacacttctgtcatttcaaaaagttcctttgtgcccatttccagtcaatcatgactcccacctctagccccaaacaactagttatagggtctttgatgagataattttgcctttcccatgagttttatataaatgaaattatacaacatttagactttttgcaatgtataggcttttgtatctagcttcatcttaacaaaatgtttttgaggttcagtcatattgttgcatgtctcagtagattcttttaattgctgagtagtattttatggatacactatattttgtttatccattgatcagttgacatttagattgttttcagcattggtctactatgaataatgcatccatgaacatacagttacaagtctctgtgtggacatgcatctttatatctctttatatcctgagaataaaaaggctggtttgtataccaaatatatttttaatgttttaggaaactgccaaattattttccaacatggctgtattattttacatttacattagcaacttataagagatccagttactctatggtctcagcaacatttggcattgactctatttcattatagccattcagtgagtgtgtagtagtatcttgttgtgattttagtttgcatttttcctgctgactaatgttgaacaacttttcatgtgtattgtcattcatgtgatttttggcaaagtatctttgaaatattttgcccgtgttttagttgttagtcctcttactgagttaaagaattccttattaatttgggataaaacttgcaaatagtcctctcattctgtggatttgtttttcattttttttattggtatactttaaaaagcaaaagcttttacttttcatgaagtcaatttaccaagcttttcctttatgggtcatgtttttgtgtcctatctaagaaattttggattgactcaatgtgaaaaaaaaaaattctccatttttatcttacagttttatacttaaacatttacatttagatccatgaaataatttgaattagttttgtacatggtatgagttaagcatctaagttctttatttcatttttattttttgacacataggtatccaaatgttccattaacatttgttgaaattgccatcctttccccattgaattacccaagcatctatgcaaaaatgcagttgaccccatagctaacatcatattcaataatgaaagactgagatctaagatcagacataatacagaaatgcccacatattagccagagcaggtaatcaagaaaaagtaagtaaaagtctcccaaattagaaagttgattttctttacttgtagatgatatgattctatatgtggaaaatccaaacaaattcacaagaaagctactagagctagtaaacaaattcagcaatgttctatgttacaagatcaacacacaaaattagttgtgtttctataagccagcaatgaataatttgaaaaagaaattaataaagcaatttcacttataatgcatcaaaaatttaaccaaggagatgaagacttgtacattatctgttttctgtgtttccaggaaacctatagtataattgcgcaatgttatttctatgcactgttccttttatgcttagccatgtgctctccagtgtctcatgagtttcatgcaggatctgtgtgtgatcacttttctattaggatgctaagatagaagtaattttcccattagtatatattatctgtggtaataaatatattacttattgccaaataagccatttataattcttgggatgtaagaatcaaggatgccttccagcacactggagggtagaggaaataaaggtgatatttattgaacaattactttatacacatatacacacacacacacccctacatacatatgtgcatgcacacacacacacacacacacaaacacacacacaccttatcttcaaaataaccctgacggggagacattatcattctcttaatataaatgagaaaaggttcagagagtccaatcaatatttgactataatcatacaactaccaaagttccaaagctggagattcaagctggtggttcccaaagagatggatctagtcacaatattatactctcatcccataaaagagagtctggcatatgcaaagaccattcttggcaattttgatgagtgaatatgtgaacattttttaggaattctacttcaagcacataaaggttcaagttctctcatgctcaagatttaataatattattctcaaaagtgttggtaagtcatctaaaccttctggcttatgaaaatttcaacttaaataccaaagaggtactatttatttatgctgtggagtcagacaagattgtggttgacatggtcatagcaagtaatcagcttaaatgtttggaaagagcctctgtgtgtgaagaacttttgttgccaaggatattttcatgtaatgcaaatcattttctacaccctttgacatgggagtgaaacatctatctctctttcattttcattcatccccaaagcattttgctgccttagaaaatcatctgaaggtcagttttgattgctctaactctgaaatctgttgtgttcctgatagcatgcagagttttagatgaaatcactaatattcactaaaaaatgttaaattaccatgaattgcaaggttctttgagagtgctgtaaatgaggcagttgatgatatttgtggctccaccaagaacaacaggatttaaaaccctaaattaaaatccactgaaagggtcaaatgcattttcagtgttcaaccgatcaaagtgaccatatcaaatatggaaaattcatgaattcaaaaatgtaaggtgttattcggaaataattcttttctcatgtgtcattatgagattgttgctactcttttcctatgtctaaataggcatatagactgttggaatgttaatagaacaatgcaaattccaaagaagaaaaagacaaaaggagggcaatgagcatgtatctagtttgaatattttaaaacatatgatgtaaatattatctgccttaggatcagactttgtctttaggaagcctattcatagtacatggaattttatatattttacattcagtgctgtgcagaataaaacaacattttccccctctgttctcacaccaccatcaacatagttgaacaagcaattctgcagcattaatatcctacaatccagttcaactcttgcgctatatacctggaagtagtggcagattccacgggtgaggggtcagtccccaaggctgcccccaacttctaacaccaatcacaagctccaggttattttgcctgtgcttgtaacccactggctataaattggggctcctatgactccctccttgggttcaattactttggcagctcagctcaaaataaggaagcacttatttttactgatttatgatacaggatattgcaaagatacagatgaagcaatgcataggacaagatacgtggaaaggggagctgagcttccatgtcctccctaggtgtcacaccctccaggaacttccacgtgttaaactacatggagctctccctgtacccccaccaccccccaccaccccaaacaccctttttgttgttgttgttttagacagagtctcgctctgtcgccaggctggaatgcagtggcgatcttggctcactgcaacttccgactcccgggttcaaacgattcttccgcctgagcctgccgagtagctgggattacaggtgtgtgccaccatgcccagctaatttttgtatttttagtagagacggggtttcaccatgttggccaggatggtcttgatctcctgacctcgtgatccgcccgcctcgaccctttatagcaacttcattggataggcatgactgaagcatggatgtggcagactaccacaattactacttgagaccatcactacaacagttactactgttactatttgagactgtcattacaagactgaatgaaggaggatgaacgcagaaatgaaaacttaaaacaaaaataactattttacaggaagggtaacatggggaagaagaagaggggtccctgcttcttgtgagcaagggcagctgcctgagctgcttcagcccttcatatttattgggtagaaagagcagggaggaggagggcatgattggtcagctgcttgattgatcacagggtcatattattactaacaggcttcagatttgcctaataacaagaaacacttgtgcctgggtcatgactgccctcagcattccttccgggtgcagacgcagtttgtcagcttgccaacatcctgctttcatgagaacagtttgctgtttactcatatagcctccagtggtatacttagttgatcacgaccctcattcttttggccttcaacacatggacaactatgtagaaatgtgatttaaaaaaaaaaaggagtatgatttcatactaatcgactgagtggggaaaccctgcaaggctgcctattcagagtcttcttggcctctctctgcagtattcattcctccagggcatggggcaggactccttctaaaatgagggtctcatgacccacagtcagacaaggtaggtcagagaatttccttatggccggctctaagacagaaaggtggaggaacattagagtatatttttagtttccctggcctgccttggggagaaaaaggaacaggtagaagcagaacagaacagagacagaccctattttctgaggcctacttctgaagcctaaatctccccaatattgtaacaaaagactgtccttcacctgtatcactcttaaattgttctgaagctgcttcaggacccttggataaaagaccaatacttcaacaaaagataggcttattgtgttagtcaccaaggaaatagcaaaggctatggaagttatgagccaggaaccatggacaaaaacgtgtgtgtgtgtgtatggtgtataaatatcaaagtgctcttgaaatcctgtcttaaaatgtaataatttgattatattatatcttttagacagagttcatatattatatctattaaaaagagttcatcactcatgggtcctggtgaattagcaatagctctggggtggaagtctttgcttagtttgcagaataacttcactttactgttccctacttttccactttgctctgtcctccaagattctatgtggtttgcatcagcagcctccattgccctctggccatcagttagttgatttcagctgctaagagggacccaccaaacatctggagggcaggtggaaaaggaagtcaggatatttaattccccgctccctgtgtccatgtagaagcagcctcaagctaactgcatccctccatgagtggtcatagctcctgtcaggtgatgctcttcatacagtcatttctgtccctgagttctgtccccatttaagctagagatagtgtgcagagaagagttaacatagcaagcctgactgcttatttttagaaagacctgcttacaaagttggcctttggctgacatctggatccccactatccccagaactgataagagaggaccactgcacttaaacatttgtacaaagtacggtttatgcttaacacctgctttccttgtgggggtcttaaatttgggtaaatgccagatagaggctgctcataggaacagcccccaataaaaaccctgtgcactgagtttctaaggagcttccctgattggcaacacatcacacatattttcataatgcattgctgggggaattaggcccattctatctctactggaagagaattcttggaagcttgtgcttggtttcccctggacttcattgatatgccttttccctttgttgatgaattctgtaacatttcactgtaataaattttagccatgagtaggactatatgatgagtcctgagtcttcctagtgaatcattagacccagggttcagggttggcttgagaaaccctgacataaatagcaaaagagctctgcagttctgtacctgagagtactggaccatctcttttgcccacccttttgaaagtggttcctttattgagctctccccaagttactttttttgagtgtgctttcttttactgaggcttctagtgactgtagatatttcatataaaaatattaattatttgatggattcttttctgtaccttacatttacatatttcttaacaaaaagatgaatggtttaaaagtaaggtaacacagcaacctgtacccttgacatcttatttaaggagaatgtttgattaggttgtgcttctttaaatggatgggggattgtgcatcttgtttaaactagaaaatagtacgtaaactggtggttgattgtccctaaaaatatttagctgttgtttttctcctttatctttgcgtattctggtgaaaaaaaagaaaattcactctcaaaagcagggagactaagaaaaatttacagtgacagaacacaatgttttcatggtatatatttatattatagaaaacatcacttaagtagtgagatgaatgttcttatttcttatgtgcctgataagcaattgtattacatcttaaaaacacctctaacaggtgatggtacattcatatagtatattcaaatcgtttcttgataatatttagattatttaacatccatagctatttatatcaccaaatattattctttcttttacactgtgctctctgaagcaagataaagcattgtgcttaatggaatggaaagcttcctctcaaaaacccaaagattatgctacttaaatttcaagtttcaatggaacttatgtcaacttttaaattaactatgtaaaaaataaatgttgtgcatccttggatggtttctcaaaaaaaaaaaaaaaaaaggcaaagaaagaaatgcttaatgtaaactatggtggttttttacccccaactatatttatgccagctgctttgacctaaaaagtttttttatgcttatagataaaaagctttgttttagagaactcatgaaccctttgtttattaatgtcttggtaaaccacatgtcttcttgataaagcaatcctgaatcagaaagacctctttgctggatatcttacttcagtttgcttttctgtttattgattgctttgctaataaatgctctcttcattgtaatttagctccattccagcaacctccgcccagaggacaagttcaaagttcttctgctatcaatctctcctggagtccacctgattctccaaatgcccactggcttacttacagtttactcagggatggttttgaaatctacacaacagaggatcaatacccatacagtgagtttaagggtttggtaatagaaataaatattctgagaattgacacattagttaagttctttgacattgaggataaatgctgttgtggtttcctctgtctggcacagagtgtttcaaacagagataaaattacaaatttcactagtaatcaaagaaatacaataaaaatgagatgcttattatctgataaatactaatgcttatcacattctcaaagatgaaaaaaaaatgaccccatcaagaattgatgggaatgtggggaagctggaacttttataaactgctgaggtgtctgtgtgagttcattagtacaacttttcatgtacaataatttgttaaaatctatgaaaaaatctttccttttaacataacatttgacttagcaaacttattttaggaagtttatctcaagtgaacagtcattaagtagacacacaagatgtccatacctattctatttgtaacatcaaaatattgaaaatgattcagatgttcaacaatgtttcaggaaattatagtatatggcataacagaatcctggtacattgttaaataaattataggctatgatagcatataaactgataccttagttcacatatcaataaatggaaaatgttcatgacatattgtttaaggcaggggtccccaatccccaggctgtggacaggtactggtctgtgacctgttaggaacaggaccacacagcaggaggtgagcagcaggccggcgacattactgcctgagccctgcctcctgtcagttctgtggcggcatgagattctcataggaacaggaatcctattgcgaactgtgcatgcgagggatctaggttgcacgctccttatgataatctaataataaatataatgcgcttgaatcatgccaaaaccatccctcctcaccttcccatcctgggtccatggaaaaactgttttccatgaaaccagtccctggggccaaaaaagttggggaccactggtttaaagtaaataaagttattaaaataatctgagaattataccattttaatttacaaatactggaagacataataaatagatctagttttctctaattgtaaatattatagaaaatgtatcaaatatttctattataatgaattcaagttttttaattctcaggttaaagaactattaaatctggcagtggagtactaacactcaagcaaatagtgtaatttaatacacacattgctgtttccgcagagatagaacacagcaacataaacttttgaaagagaaaggatataaacaagccatcaagcctatctttgcctttgtaacttttatgaagattttaaaggagcttatagaaatcaaattattagaattcattgactttaaaaaacatttactcagatgttttagatacagtttccctaaagacagaatgaaaaaaataggaatttttacattattccagctctatcttctctgatttttgcttctagccatgtttagctacacactagtttaagaaacctcggaacagcaattccaattcaagtttctattttgttctcttcatttaatacacagttttccaaattctactttaaccatgcttaattagttggagaactgtttaaagctctgtcgaaacactgaaattccataaccttccttaaaatggttaggaggatgccttgttttaacattttaattgactttaaaactcctgcatcgcatagagttttattttgtatgcattatactgggtttcattttgcacctaattcatataactggaatttagtttcttatgtccacccctttctcttggctctacatgtctcttcagtattccaagtcttctttaaagttaatggaaactctgaacttcatgatgcagattgcaaagggaaatgaacatctgtctacatctgccatgttggcaaagtatcctgaaaacctgctactagaatgtttattttcttccaaatatcagcatgatccaggtgtcctgaaacttaaacttttgtgacagagaaagagaggagttataaaaatattgaaaatgattttgaagatgacagtaccactgattatttctgaagttgtgaattagggtcaccctactttccatacagcttaatgcaatagcaaaattaaacttaaaactatcaatgatattattcaagccagaggcatgatttccatagtaacatattgtgatctattttatagaacatcacatgttagtacaacattggctgtttttgacgattgcactaataaggaatccaaataacattttcttacataataaatgtgtattcattcactaatcagacatttatataatcctattaaacaaggtatcatttcctaaaaccatatttttcattaaaaaatgccacttctggcatttcttgacaatcactgtaattaatgatgtgaaaattatctgcatgatggcatttgaacagtaagaacaattggttaacactgtcagaactttgtatcattctaacaatagcctcatgtttattactctatttctagtgcgtggctagcatgtgtaacatgtaaaggaaacactacttatattcagctggatgaacacaaatctttgggttaaataaaggcattaggaattataggtggagaatcattgaacttttcaaagaaaattaatagtgttgtcttccaagcaagtttgatagtttgtttgagacctttatagaattcttttttagaatggaaactttttctagctggcctaatgtactatgggattctctaagacatattttccttcttaggatcatgatatactggtgtaccatctttaaagctttcaaattatttgttattataatagcatgcaaataatgaataattttaaagattgtgaataattaactttaaaaaacaaggtatatctttacgttttatttaaggtagaggtcaagctagcgcttcgagaatcatacataatcagccctaacagtatctctattgtagcccccttctgggttgctcataggtatcttacgtgtcataggaaggaagtgaacagttattggaggaaatagcactcttctgttagtgttgcaggtttagggagtggacagtaactcatactgttttttggtgttgttcctatttgagtttggaatcaaaggagcactagacatagtaggcagatcaaatttaaaaataaaaacgatcttcattactgatgaaagtcagattagagactatatcctttttcctgcaggaagacaaattagaagagagaaaaatcaatgggctgatctgcacataatttgctccctacaccctgactccccagattcacagtcagatgagttgttcctcatttgggatggcatgaatggggagatagcccttaaatgtcactttagagaaatccttccacaggaactagaggatgattatttttacatgtaacaatgacttctatcacctacagatattatcgtagtttaagcttagaattttagacaaccaaatattttaatgagccctgggatttcatttctacccttattcatttccatctttaaaattataatttataatctcatactacatcaagggatcaatgtaacaagtggtaagatgattcagttagctctgagaggaataaatgaagaaatataagatatagagacaggatgagaaaacagaagagaagatgacaggcaactgtttttataaggctcttaatattcttaatgcggtagtttccccttatccatggttttgttttctgcagtttgttactcatggtcaacaatgttccaaaaataggtgagtctacagtacaataagatgttttgagagagagagaaagaccatattcacataactattattggggtatattgttataattgttctattttattttcagttattgttgttaatctcttactctgcctaacataaattaaactttatcatagatatgtatgtataggaaaaagaacagtatatatacacacatatatatgtatgtatatatatgtgtatatgtgtatatatatacatatatgtatgtgtgtgtatatatatatagtttaatactatttgttgttttaggaatccactggagatcttggaatgtatctcctgtggataagaggggactactatattctttcctggaacaatagatcaaatatgtatagaaaaatcattcatgtgtttaataaaattttgttcagtgcttattccagaccagaaactgtatcagtcattagaaatacaaagatgaaaggaatagttctccttactgagtggggagacatataagtaaaccaaagtaacaatagaatatataaatgttgaagcagagtaaacttggggtgttaaggaagcacacggtggcttgggaggtgtaggaaatgtaaccatgcctgtggtggcaatgatgtgatggagaaccactgaaagtttcccagtaaagaaagaatataagctgaattagccagatactgtagttgaggaagcgtgatggtcatgaaataaattttgtattaaaagaaaataaggtatattcagcaatcatgggcagttccatgtagctttggtaagtggtacaatgggggagtgctacaaaccaggagggtatcagccaagatcacaaatcagtgctgagccaaggactgtaaatgtttctctgaaaatgcagaagtctgtagtaacagcaaattttcaaattcagtgttaaagatccgtaccccaaccaaggagagcaactaccttgagataagcactcttttaacctgagtattatttttttgttatggatcattaatggatatcctattcataccctttcaaatgcttttatatctttcacactataaattgccttatatgatattcctacacaaatgcatatttccatcccaattctatctgattctaatttcttattaagtagactgctcttgtataatacattctgatctattaggattatattccacttttcagatgctacaaacattcagcaagtactgtacttcttttaattgtcatcaggttataagtcttccaacttccagtttaagcttatgccagacaatcttttggaatattcagcactgaaatttatttttttcttttaggttttggcttttggcatgctaaattattttccatcgttgttctagccttcagtgatttttcaaattttgttaatgttttcaacaaccttattgtgggataagggtaactttaatctaatctagtaaatatttattgaaataacaatgagccacagctgcacgctctctagaaagtctgaatctcagccctaggggacttttccaaatatgatccttctttgggtgctctgccttagcactaaggatggtgactttcccctgtctcttctattcctatattctttagagttttctgtaccacttagaaagtaaaaccaggcgacctctggtacccatggtacaactgaaaacagccaccagagagagaactgtctcaccttcctcggctctatcagggtcatctctgataagacagtggccctcacctgagtcagtgcccaaggtgccccccacaacaccagcggaggcctcctccactgagcagtcggaccccagagtgctctgtaggagctgtagactgggaagaagggccgggtgtggtggctcatggctgtcatcccaacactttgggaagctgaggtgggcggattgcttgagcccaggggttcaagaccaacctaggcaaaatggtgcaaccctatctctacaaaaaatacaaaaattagccgggcgtggtggtgggcacctgtagtcccagctattctatttgggagactgaggcaggagaatcgcttgaacccgggaggcagaagttgcagtgagccgagattgtgccactgcactccagcctgggtgacaaagtcagaccctgtcttcaaaaaaaaaaaaaaaagaaaaaagactgggaatgcctaggtttacacgatgggttatcactccaaagatttgtgtcttttgtggccaatggcagatccaggaaagaaatgaaagttgccgatggggataggctgggggagagcaatacagatgtgtatgggaaaccccaacccatatatattgtaaatagatggactaggctaaacattgttgctgtttcagtcttctgcaaactcagcttttccacaataaagctctatctcctgtcggaaggaaggaaggaaggaaggaaggaaggaaggaaggaaggaagggagggagggagggagggagggagggagggagggatggatggggggaggggaaggggaaggggaagcacataaatatgctgggaccttcatattgctatagggcacccctgcttaatggaaccctcctcgcatctccaatgcaaacagccccatggcggagcaggcagcagccactctggtatttgtgtgtttcgcagtcctacagtgtgtttcctgtccttagagaacaaggatttccagccatgtgcctaatcacctccactccctatcttattttttaaaaacctctttgtagctgcttctctttgccctcacaatccttcatgcatagaagtcctgcttatctaaaacttctgttgtgtaaattcctcattgctgataacaaatgtctccaaaatttagcagcttaaaacaataaacatttataatttctgtaggtcagaaaataagaaaattttccattcaagatgttggccaggtgacagatttaccccttggtggtagtttactgacccttagtctggtgtgtttagtgtttaacaagcaaacaagttacatagaggaaacatagttacttttctgttttggagaaccgcaaggactttctcttagaccttctaacaaaaggacactatgaaaagcaaaagaagaactaaaacaaacatctaaacattctttattatgaatgatactttcttatactcaataataaaagcaatcaaccggtatttacattatttcaattttaaaaatatgaaatgtatccttaatcaaaagagtagattggtatagtttatgtaattaaataatatgataggaaagcagttagcaatgattcttcaccaacttgtgaaatgtaactttgttttttttttttcttttcatttcaggtattcaatacttcttagacacagacctgttaccatataccaaatattcctattacattgagaccaccaatgtgcatggttcaacaaggagtgtagctgtcacttacaagacaaaaccaggggtcccagagggaaacttgactttaagttatatcattcctattggctcagactctgtgacacttacctggacaacactctcaaatcaatctggtcccatagagaaatatattttgtcctgtgcccctttggctggtggtcagccatgtgtttcctacgaaggtcatgaaacctcagctaccatctggaatctggttccatttgccaagtacgatttttctgtacaggcgtgtactagcgggggctgtttacacagcttgcccattacagtgaccacagcccaggcccctccccaaagactaagtccacctaagatgcagaaaatcagttctacagaacttcatgtagaatggtctccaccagcggaactaaatggtaagaatccaaggctgagattcccctttttggtcaagacatgaatgagaatctattgtaattgtgcaattaggaatttggcagttgtattcctttttataactgcacaatataataattgagaaacagtttctaaagatataagatagtatttgtcctggttagtggaacaagtgtatttcttctaatctaataacaaattccattcaattaaattgccccttaaaaggctaatattatctttgctcttaatgacatctgccataacacaaatgatgtttataatttgaaactcacttatgaaatgcattatatttgactgtgtcacaagttagggcacccacaagcagtacatttttctcttctaagcaagaaaaagatataaaatgatacaaaaaatatgtatataagctaactgactccattaagttaatttttgcattcatgcatttgaacccttggttatataggccagacacacattcacagatttttaatcatttatatcatgtacatattatagcaaaatctttctttagatttgtaaagttatttggtaaaactgggtagagattgactataacatttatgcaaacagggcttatgttaaacaagttaaattaaaacctccaaatttgaaaggatacagactggagctataatgatcaaattccccaaaagaactggccattcttaacagaaattgtgaatatcaattctgaaaaagattgaatttacctatgataaagtgtagttattttttgtctatgtgttatccattttggtttgttttcctcatgagtatgcctttaatagtattttatacattcatctatatagcagtttgttgtcttctatgtacctgtcatctagattactaaactactaaatcactacattttgaatgctaaagaaattgacagtaatctaattagaaagacaatgaatatccagcactctttaactgacctgtccctaccctacccctaaagtaacccctttgtctgatgagttacgtaggttcactatttaatttctctaggaataattataagatatgaactatacatgagaagactgagatctactaaagaaaccacatctgaggaaagtcgagtttttcagagcagtggttggctcagtcctcattcatttgtagaatcggccaatgaaaatgcattaaaacctcctcaaacaatgacaaccatcactggcttggagccatacaccaagtatgagttcagagtcttagctgtgaatatggctggaagtgtgtcttctgcctgggtctcagaaagaacgggagaatcaggtaaagatcaatgttttaaattctacttttaaaacctctgaatgcaaatgtttcctcaaattaaagtcaaagtactgtgaaagtacattttgaaaagcaagaattagaaacttccatagaccaaggaaaattttcatatatatggatttgttacataaacaactcaaggtcataaagtacttgcagcaagttctagggggcaaaagtaaatgctttagttattaattcatggggcgaaaatggcttaactatagttatagtcttctgggaatgtttgtcaaaaatagcatttggtttccactcctgaagtggattggacacatgtctcatcttgctccatatacagcctaatttatgttcaatgaaagagataactgtcaccaattccacaaatttgtctttgtttttatttatctttccaaaataaatagtttagatactagattgtacataatgacagaatcgtggacatcaaaatctataattcacaagtgtgcttgtaagcagttggcatgatgataaggaaggaggacaacatatctaaattttctggattatcttcattaaggcaaaaatttttaatcctccactttattttttatattaaaacacttcaaatttcatgagcctttaagaaaaaaaatacacttttgttatgtgtttaatctgtagatatcaaagaaacccaaaccctgatctaaacttgacctgttaggaatatggaggatgagggtagctttaggttgatgtccaagggaatcatttcatgaataaaatacgcattgtgcttgagcatctcttaatgactaccagccatcttggacaaataatagagccatgatagcacaagtgatgaggcatggcattctggaaggggaaaatcaaggtcagaaatgaaaagtaatgggtgaaactgcaatactggtccctcgtaatcttatgggtcactagctaatgaaagtgcaatgagttcctttgataatacacctttggttagcacatttaaaatccctgtaaagagctcaggagtggcaggggggaaagggaaatgcatgtgtatgtaacctgaacatttcaagaaaaatttaacaaaaactttgagacattcattggggttatttagaatgctttaggtttacctctttctgaagaataatattcagccagctgcattggattggctcaatgacatatttccctacatgggaaatccagtacatcaccatgcatttttctgaactttttgaactgagatgttctatttttgtgacgttttttagatactcgtaagacttataatttcctatctatccactttcctatctttatgaacatgagcaaattcctatgagatttttattttgcaagtagaaagtagctggtaatatgaagatggagaatatactttcagataacattttaaaaagtgaataccttttacatataccagcatattcttggactttttcaaagcagaatattttaaaaggtaaaggtatttcagaaactaaatgaatgtgtgaattaaatttaaaaatatatagggacgacattcattgttttgatgttattgttattgttctcattgatagcacctgtattcatgatccctccttcagtctttcccctctcttcgtactctctcaatatctcctgggagaagccagcagataatgttacaagaggaaaagttgtggggtatgacatcaatatgctttctgaacaatcacctcaacagtctattcccatggcgttttcacaggtattgttatttttaactaatgtcctttcagaattggcttagggcttcatttggacattttttgagtttgcagaattctgtgacagaattctccctctatattgattaaacagggcattttttcttaatataatattatgtgtacaagcctccctctttgtatgtcacttgtatttttccagtataatcatatattgaaactaagttggtataatttatttcataagacttgttttttttccatttatcatgtatccttaaatattttacatgaagttgactttcattaactgtgtactatcatgttatttggacacacaataattatttaaccagtccacactcagttgatattgtattgtattaattcttttggaaatataaataacattgataaaacttcttatatgtacatttcatatacatttctacttcaaaaatctgaagaattgaatttatcacagcttataacaaaatgaattatgaatatgttcaaagttttgaatatacagtcatatattgccttctagtaattcatcccccagctagcagtagtgagaataattatcatagctaaaagttactgaggctttactgtgtacgtgaactaattcatctgatacatacagcaatcctagaggataggaggctcttgttctctccagtttacagttgtggctgatatacctctctgcccattttaccagcatccaggtggccaatagcagaagctgatggaaggatgtcaaccgaacaagttcttctgtgtatttggctgttcagtgcctcctctgagagagatgctcttctctgggcattagcataagataaaaagatctttacactttatacctactcccatagatctagccacatttttctttccatgaattcctagttcctgatccttccatctttttttttcatgcccttggccaatatttccaagccactgccatattgtccaggtacattttaccttgagacacgtctctttccacacaacatgggtgaccaggtgaactgcctgaagttctgcccactaagaggatttcttcgctctgctgtttcacagggtcatctctgacaagggttttagagcaacagctaccatttagacttgcagccacataccaagacatcctatctgtaaactaaattctgctttttttccacattctttcagctcttaagggacctcccatgggtcataggtatgagctgaggttgagccaccagtataagaatggtggatgtcatgggggcctgaaccacctgcttgcacaatgtattacggcttttggctctgcttatacccaatctcagacatccacttccattttatgatgaatttctgttgggcccttctaacctcaagacttggctgagacaattccaagattataaaaaagtagctctagctgcatggctatttggtgttccatgaccagatgttctgtttttactgaagcctgaaagcatgctagggccatttagcaaatggtatatagtttccattacatgttatgcctttgttccaagctcttggggtctatctgccctgtgattctctttctatgtgtgccttgcaacattttttcccacaatgcttacctctagtgctgtaaaaattactacatgttatgtcccaagtggctcatctgcctgtaccacaggctggacctggtgcagagccctttccgcctctgggatacactcaaaactggcagcattccatattactcagtaaatttctcagaacagtattctcaaatgtggaatatgctcccttcagaatgtgaagaggtcaactagacattttgtttccttcttagtggtggtagaagcaaggtgcaataatttgtcctttattttggaggggatatcctagcatgtctcaggccacttgaactcctaaaaacttcactgatatggtagattccttaatcttcataatattgctgtctcactttctagaacacatatgtcttacctctgcatacctaccatttcttgtttgtctgattcatttaatatgatgctatcgatataaagaatactgtcaaggtggcatttatagtttgtcttaaattggtgattaatcaccctcagatttcctttgtctttcttcagtgcattgatggcgaccagcaagatccatgcattgtccttataattactagtttccccagagtagtccttgtaattactaattccaccaaaccagtgaattaccttctactggtaactcatcgcagttcaccactaatggaagtttaagcattgcaccactagggcatgctgtggactgttagtactctacctgctgtctatgatgagatcattgtaaaccagcaagtggatgatggagctccaaaatatcattttagagtctccttcctagggccagtcctgttacgactatcttagggcaaattcccccggaagcagactcttggtagaggactgagtacaggaggtttattgggggaactctttcagaaacaacaaatgtgaagtgataaagtatgtaggattgagcagcaaagaagctgaactgtgatgcaatagtggaagcagcctcagcggattccgtgggtagttctggagctgaaatgaccctcttagcttatctcaaattaagctaggaagtcagacctttgtaccctagagtatttgtgtcctcgggctggtgtaacaaattaacataaactgagtgtcttaaaacaacggaaatttaggtgttagtacagccaggtcccccacaggctctaggagacaattcttctcttctacctacctgtggctcctggtgttccttggcttgtggcaacataactctaatatctgctgcctctgtcttcacaagtcctactctgtgtctctgtctcctctgggtctgtgtgtccgtctcatttctcccataaaaataccagtcattggattttaagctaacctgaaatccaggatgacaactaattaattacatctgcaaagaccttatttccaaacaaggtcttattctgaatttttgggagacactatacaatccactactaataggtttgccatttttttctaagcctttttaggagaccagaacccatgtacaacacacaattttattttctatactgatgaaaaagaagagccaataaataatttatgattacttatttttcattaatctgtctacgtgttcactcatttgcaattatctcatgatgaatacacaactggcataatatatatattttgacttaaacaggttagtctaccgatctggtataccatgggatttaaggtaaagttagttgtaactttcatgtggtctttgccatgttgtatctcatttatactcaatgttttattttgttgtttttactattctctggctttataaactattctttctttgtaaaacacagttttgatttatctattacttatattatagtagttgttgttctaagaaaaaaataaggtgagaaatattatttataaaatacagccttagaagtcaacctgtttgttcatattccacatctcccaattattagctgtatcacacgtctctctgcttctggttttattcatctgtgaaatgggaaaaccatttttgctcacctacctgcttaaagagcctgataaatattgacacattattattagtgattattattaatggtgtggaactacattatactttataaactagctatcatttaatggggcaggaaaataaatatttttattattgttgttgttatttaaaaggctgttccttatggctgaactggaataaggacatagatatatcaccttattctcttttttatttttatttctttgagacagagtctcgctctgtcacccaggcttgagtgcagtggcgcaatctcagttcactgcaatcttctcttcctgggttcaagcaattcttgtgcttcagccttccaagtagctgggactacaggtgtgtgccactacacctgactaattttttttttaatttttatttttagtagagacagggttttgccatctttgccaggttggtcttgaacccctagcctcaagtgatccacccgcctcggtctcccaaaatactgggattacaggcatgagccactgcactgggcctaccttattctcttttgaactctctctcctgtgcaaatattctctgttcaaggaaatgaaatcaaaagtagcagaacaaagtccaattttttaccttctcaatgattaaatttgtatctgaactgacctgagtatgtcttgttataatctttgtaaataaatagccaaaattcccagggaaaatctactataaaaataactagtaagaaacctttgcctaagaatgagacaggggggatacgtaaaagtggtgatgatgtaggattcattgtgggggatcaagctgctgtagaatttttcctacccctttgaagacttatttcatgaaaaactttcaattagatagattttataagacttataaattgactctatgtacatgataaagacaaagtctatccaagtgataattttatgctgcaagttctggggccaataatgtatttttaaaataatgtaatttataataatcatctgtaaagaaggaaaagccttttcaaaataaatattagtgtagatttcttctttcttattttatttcatcgtgggttcttgctacaaagaatattttgcttaaaaaatagttgtacttcctaaattaaataagaaatagcttcatgtactttatcctaaaaacaataccattttctaaaaatttacattgaaatctaccaggattattctaaaagggatgaatattacagcaatattcataagtttaactcagttcaaggtttattttacttagaaaattttaaatcacatttcacagaaaagtttgtatcttcattatatcaataatgattttaaaattagaaaaataaagaattacttggtatttgatgtttttcttatttcaaaatgtaattgcaaggaaatggttttaaagttttaaatttaaattattcctagagttttagaatctttaaaaacacctttatttctgaatgttattgaaacactgtattctacattccaatctcactgctttttagaacaactcatgtaacttacgaaattttaaagtcaacacctaggcaaatattccaaatgaattttattttacccctaaagagaaagtctctagaaaactactccaaatgttactgaactttacatttatctgtatttatatttatggaagattattttatatgactatgtatcagtagccctaagaaaattagttttgtactcatagttactgtcatactctctgttttaatgacttttattttctgaatataatttctagtggcctttgtacctacaacctaaacaaatttacatggttgcttttgatcacttcaaattataatgacagaaccaactctcaatgttaattgtttaataatttatttatggactgtgagtttcctgtcagtcttctttgctcaaatctgctattttcatttgaaattatatgataaagataatatttcaaataacgtaactgtttgatctaatctttatatgtttgtttatataagaaagatgattgagaattgacttaacgtggatgctcagtaatatgcttaatgtttaattttttcccctttttcttctgtgactttttttcataaagaaaatgatagtatcgatttaacatagcaacggcatttctttctgtcctagcaccatcaaatagcttgggtattactgctctgggttacttttggccaagccccatggctttgtttggactttatcatgataacaatgacaatgtcaccgtctttatctctaccattggtgacaataaccataccaccatgctgctttatgaggcaataacttggttttctcatttatccactcaggaactggattattacctcataaaacagtgtgattgtacaataatcaattaaatcctggcttgtcgagactcttcagaaaaaaaaaaaaaaacccttttcctaatggtggttggcaataattccctctgtctgaattcatggaactttgactgccaaggttatattttcacactgattacctattatctttctttctttctttctttcttttttgccttgaagctgttgcacactgctaaatcccaagaactatcttacactgtagaaggactgaaaccttataggatatatgagtttactattactctctgcaattcagttggttgtgtgaccagtgcttcgggagcaggacaaactttagcagcaggtaagcaagttttaatggatatgaaaaatctgttgcctatcaagaaaaaaaacttataatattcaacaccttctctacttgagactttatatttgtcttctcctccctcactaactctgattgcttcttacctcaacagttttaaacaacaacaaccaaaacgtaacttaaagaggtacctaggagctacgagttacagctgtgtcataataagaaatataattagtggtagagtgactccactctacaactagaaatatatagaatatacaactagaaacatatacaaatatatagaactagaaatacatagaaatgtaattagttgtagcgtgactccagggcttaactaccaacctgtgtcctagcagtgtcctgacaattgtgagaaacaatcaggaagcttcttatgaggacgttaggatacctcttccctcagtccagacattttttgtaggcttggctctactcactcctgatccatgggaacatctagaaattactgtgtggcctggtgttatatttggctttcatgaaataggtaaatgtttatctattgttttattaagaagaagcttttaagttaataaaatttaaataaaagaattgttattaagtataatctgagtagaaatggtttgtataatttgtgcttgcttcattcaggactaactggattcatacaaacctgattacatgtattagtaagacttataaaacccaattatttagcattaatatattttcaaatcagtgtttttctgattctagataaaagcttagtttcctggttatctttaaagaaatgtccatgtgtaaggaggttaagacactctagatgaattacagatattacgaaaattcatgtttacctgtaaaaacatttcctagacctcctccccaaatcccttcatcctattattaataggtccaattatgtagggttttttttctggttctggaaaaaattgcttagctcaaatgatctcatccaagtaatttatttttttcaaaattttcattaatgcaaacaactctgaaattctaagaaattatggtttactaaatttataactgaacactttgtatttttatgtattttatagatgtgcatttcagatgcatgaatacattgatggagtacctagcttgtacaaaacactcttctcctataaaactatctgtttttgtatactgtattattaaaggtttactgaatgctgaatatggacagcagaggaggactctatctcctttaaatgatacaatttcagactagaagacaaaaattaaaataagaatcagtcttacaagttggagaaagtaaaaatggagacaacggagggtgaagactgggtgtgttatagtaggggacatagggatcccaagcacgtggccatgcaaaactggaatcacatcctctcagggttgcaaaacatgtaaaaataatctagtgttactatatagccagtatcaatatattctttgtaatattcccccaagtgttcatctaacccatgtctgataccttcagtgttacagaaactactacgtctcagacaaagctataccatctttagatacctcttttagaatgtgatttcttagattggtcaaaaatatctcctagtaacttctactcaacattcttattctacttccttgggggctgtcgttaacctaatttatcatccttccaataacattttcaataacattatatccacccaagtcttttctcctttaggctgcatatcatggtggttcccatctgaacctcatatgcaatagtgtctagagctgttattagtataattcttgtagatgagatctagtctgccttttcatagatataagcaaactaaagaacctgaagagagacatgcccgtccctagaaactagctggatcatggagatgggaatagaagagcaggaaacatgtctacagaatagaatctgcctgccctatgcattagtggtaacatctgtgctaatagtatcctcattggttgcagtggcaaaatcctgttgcgtaaaagatgatgtacctgggtgctctgtgcagctctcattttagttactggtgaggcgattaaaacgactcctgtccactggcaggattgtgaagtaaaactaactagtcagagccctctgaatcctctctctattttttttatccttgaaaaatagaactggaaacttatattcgctaaaagtcatgtgacgtgaaagttagttgacttacaaaaataagagtttattcatatatgtgaggggaaaaaaatggttagccaaaatgccagggtttcaatccgggctctgccattgactagctgtgtgaccttatataaattatctaacctctgtgccttagttttccaatttataaataagcataacttatttgtagggttctgatgaggattagaattagttaatacatgtaaaatatttaaagcagtgcccatcacagttcattctcaataaaaatttattgtcatgatttttatcataatattatagaagacttttgttagtcacagtataaatgttatggaatttctaatgttatcaaaatcaaggagagtttattttacaactttgattttctaacattattataaaatataaaatggagagttctaaaactaaggattgtattgtgaaaataaaacttagaaaggcttaaaatctgaaagcattatttattatttctgtaagaagtatgtcattcagaattattatgcacatttcaaaactttgctcaaaaacagcaaatttcacatttgttggttgcaatatagagttaataatgtgccataaatgtattattactacattttattgtgaatgctcaattcagaaccatctcttgagggcttactatttaaagcactgtggaggattctaagataattatactcagcatttgggttaaggagttgagatccaacaggtaggattaacaccatggcgacatgtgctaagggctgtgagaaaggtgaaaaaaatgctatgggaaggtagaaaatgagataaatgattttgatttgggagactgagtagatacctcattaaatgctatttcagataaactataaaagaatggtaaagactttcgcagatatttactgagcacatacaatgtgctagtttctgttttaggggctggcactgttccaagtactgatgtaatgaaagcagagatttatgaagacttccctggtggtagagtacacaatagattagaagagggagtgtaataagtgtctggtagacttttttaaaaaggcaataagagagtaaatcagacgagtagaagtgaagattgaaagaagggaatggagtgacttcaaggaagacagacctggaagttaagcagtgggaaggatggacaatgatagcaaatattgcagcccatggtggtgccattaaataaaaggggaaagatgaacaaagaacagatgggagaaataaactcgtgagtttatttgatcatttgatagaaacacatccatgccaattataaccatccaggagcagaaattgcaaatctggggcttaaaaatgatgcagattttgtattcatctgcatatagatgggagctaatgctataggttataatcaattagtgaaagcagagaaaatgcaaaatggaagcccaaagaaaacaccttagtgaatattctatctgggaagaaagaagaaaggaagagtgaagtgaacagaggtatggtcagaattaggaaaagaactgagaggaagcagtatcagaaaagtcaagggaagagagaattctagaaggagaatattgtctgcagtgtcatatggtatagggaaagcaagagaaatgtgacctaaaatggatgcgaggtcactggtgactctctggggattaccctaattagcatggttgaagcagaagctggaacatgaaggattgagcagcggcaggaggagatatagtggtaaatttcaaatgtgtttttttttttttattctttgctaaaatttttcttctacccaattttcattcttcaaaaaattgtattaccttttgtttccatataaaatcctttcttttctaaagaaaaatttattttagtgtttgtttttttctggaaaaaatgtttattttctaattccttaatatattttgttagaactatctgattcttcacctgcccagcagaaaaagaaagtctcttatatgacaaaagtatggaaaaataatttttacttacagttgggtttattataaaatacatcatttttagggttgttcagatcagtgaaaataaacttatttgcttttatttgaataccaggaaaaaattataaatccatcattctttttgcctccttccttattcagtagatgaatgtgtatttctaaatgtttttccaaaacaaaacatctgaatagaaagtatagacattaaatcatagaaatacactgcagacctataataaagccagttctttagaatggtcaacaattttgctataggagagtaataaaagttgacttgcaactttactgttcatcctgctctgttttttctactattaacattgcaatttggagagtatatattattccaatgaactccaatggatttgtgggaaatttaactcttatgtctaatagctcatatgagctcattatcagacatcaatggaaacgagtgaccattcaaaaattttgaaaaagagcaccacaaattagaagtagtaattagccttttggaagcatttgaatcatgaaaagatatgttgcccccttaaatctcggtctcaaaaatcagaaagatacttgtgaagatttatcttgctgtttcattaaaaagcttgagaattataattggctctctcttgttttaaacattttttcaattaaatatatgattagaatgggtacatttcatccagagtattgcactgctgcttctttagtttcaatgcctgtgacaaagtctgagaactgatttgagagaggtgttctctcaggagcagctgcatctctctccattgcaaaatcttcaagcagtgttattaatggctttggagttgcttctgggtgtatgaaggtaatgagttgatgaactgggccctcttaaaatccttgttacacttttctttaagattctccttttaatccgagaaatttgtgcatttccacccattgcaaattgagtttagtttaaacccttcttatgagaaattacttttggagatccattcctgaagggacaatgtgatatttcccttgcctgtcataaattgacctccatactacaagcttagaagtgcccatctcgcataaaacaagtaattggtgtgcattaaattttctttctgaatgcaaagtaaaatgtataggctgtttgctgctgggttgaaaacacacattgttttgcattcgggtacataagtcttttccttgtgaataggagccagagtgattaaacaagcactcttaatatgttaatttataattttaattacaacaatcttgtatatatagtcattagtgaatactaatataaatatttttctacctttttattcataatgcataaaccaatcacccagttacttctctgaggttgcctgtttttgtttcataatacaatctttgttcttagttatgaatgcattttgttcattcctgtcttcaataatccctcattaagctagtcactttctgctccatgctaaaaaggaaaaattatcatgcaaatgtggcatgccatattaaaaagcacattaccaaacacttttgttgctgtccttcaattagtttcccttctttgaatttaattccatttgttgttaaactactgacttgatgtatggactcatgaatctgaggctgctgccaagaaagtggggaaaaaaaatcaaagcctcttcgaagagctgcagaggcgagctgaaatgaatttgcttcacctttgacaagaacacttgaacagcattggaatcctctgatgattcaacttggctaattatccaattatttatttcaagaataaaggcaccattttacaattaaggaagtgtaaagtagtctgagaaatttggtaatgacagatgacttaagtaacttctaagataaacagtatctgtgcaaaacttgtcccaccaattgttttcaggcagcagttggtgtgtcttagcatcagtgaaatcctgagtacactgaaggttttttgtttgtttgttttgctctttcaacagaaattattttacacttgtaaccaacatgtcaaatttccatggctcttaagcaatgtttaagttatatttctcttgattaaaagctttcggttcaaagcaatactttttaattgcctaatgatataagtcagttcttaggaaagaaccgcacatttaggagttcatttgcaatataactgaaaaattcattgcatggcagtaaaacaatttactgttaattacaaggagaagaatttgctgtagcatgctcgcagattgccatgaatcatgcagcactcctagagatttataacagatgtgtaaatgggatgaattagcagggtttaataacagagacacaaatcatgcagacttcaaggagctttaattgatatactagaatgtgacgggcatgaatcactcagccattcaacagcactgtaacatatggtcagctcaatatgccgcatcttaaatcggttggtgagtcgtaggttgtcccatatggtggaagcaatacatttttcatgattaaaaaaaagaatccattttttaaagaaatatgattgcaaagcatgttattgaacagtcttctgaatgccaaactgctttttttaaatgcttttttttttctttaacatggcagcttctcaaaataaataggggctactccttgtaataccagatcgctggaggcattataagaaccaaatcggtgcttgttggcacactcgatccacagcaagcctatagaaaagcgcagctgatgattgctgtgattgtcagggaaatccttcaggctggggcaaaacaaacaaatgaaaggatgatgtcactttcagagaagttcaggaatgcccagctttgtaaattgaagaaaatgagttggatgagagatccctgcttagcagggtaagaaagtggctgtgataaataataccatgacccctaaggtaacaattggatgtaacattttatactaacttcttaattaaatgctcagtcctacaggggcatgtgaaaagaagcactggctggtcatcacatagatggtagcaccaattccaagtcattcttgaagaattatttcagtatctgcaaacaggtaccctggttgaagactggtaactggtagtgtgcaaacatgtttttattggaactgggatctggcagcttttggaaaagcttttgctgcattagtaaatctgacagacttgaaaaaggaatattgcagccttagaactgtggctgccagaatttaatgtcaacaattaaaatttattttgatccttacctagtgtttattactgtttgtatacacaacagaccttactaatacagagatgcactattagatggaattaccatctgttcagagtgaaatgctggcatctgtcttagatgctaaaactaaaatgatattatttctaacaaaacaaaattaactgctttttactcaccaactttaatttgtagtgtgtagttgtatccaaggaaaaggcttgattttgaactatgtgatgacctctgtggccaggtctatatttagatatgcgactttatcaggggctctactggcctttttggcatatgaaaatggcatgtagaaatcacactttcaatacacaattatagcttcataatatactatgtatcctataagtcattaaaacaacacaaccaagctatgtaaaaattgactgaatcagagagactctactatgcaaaatattttgacagatacgccctaaaaaactgcaaggaaagaaattaaataggcaaaaaatcatctgaacaaagttgctataggtcccacagtgacatctttaggaaaatacaaactgtatctttcttctctgttagactattttaaattttctcccacatggacatatataaaaaatttacattcagtgccccctccttttaatttaaagcctaagtatcctattaaaataggtctttagcttttggaagttagagaatttggaggatcaaggacaatggtagtttccatactgatgttagatcagtgacgctactttctgagaagccagacttctattctatatatcacaaaataataaattgtgtcacaccagcatttaatgcatgtacacagtgcattaactgtaactgtagtacatttatttgtgctgcaggagacttgaaaatgatgaagaaatcgatactttgctgtcagagaagcaagtgttacgatgcatttaagtagttaattgcataagccccataaaagcttcaagtttgggtagcaaggatgccataattacagtctgagcaactaccttttattagtggtggactttagggaatggtggttgctgtcatcattgctgctatatgtgcagtttagaaataatggatcctcttctctcttcatgtgtaggatggtagttttgtgcaaattattgtgatcgccagaacaataactggttaaggtagtgtttgttcaccatgttcactgaacttctctaaaagcagggttttctttatgtcacagaacacatagacaaatcatatttgtatgccatgctaaggtaaaggaacaaggtggctgagagctgaaggggataaaccagaggggctcctgctggcttcccaggagcaaaggggatcaggatgtctggtacccattcgtggcttatgaacttagaagtactgttttaaattattcaaccaaagaattttgaaactggaagaggtcctagacataatcaagcctgtcactctaacaattgaagtaaccgaagaatagagagacctaataatggattaaccaatgttccataatcagggtcttaaagagccaatctagagcctacattttctcctttccagatcttctagtaatatcctctcctgaaggtgacttgtcaacaaagaagaaagtggcaaaatatattttattctttcttccctggtcagataatagacagtcaacaagatgatgctgagtcacccctgagagtttcgggggaaaacttttcctctttaagacactgattggtgagcagctgattctgcagcagtctctctgcaacagagaaatcagggctcatgacctggacttcttgtttgcgtcctggtccagtgcccttttgcaagtgttctggcctagcagtgtttggcaaattgtatttcctggcatagttttgcatttctgcgaaaaagtcaaaatcatattctattgacagggtgcttattaagaatgtcttatgtagtctgctccccacccacccctgaaacatagaaaaattgtttattcttaaattcttgtcatcatcatagaaagctgatgatgctttaagatattgacacagccatacagtcttcataggcaaaaaatgaacagattccttaaaaacaaatgaacagattccattttaaagaccagtacctcagaagagctttgttcagcttttagttcttatcctatggtgctcaaaatgctacactacataaattttgcaagtctaaatgtattcatttggatatactactaattatgttataaagtaataaatgctgcataaagaatgcatattataacattttataaaaatatctatacatcgaatagatagacaagaaattagattacccctattaaaaaatacaagtgctattttaaaagtacaagaattttgtacttttattcaaatagacattttattcttagaaatgatggataatgaacattcattttaaactttgtatattatccttagaaataatgaatattgaagattcgttttaaactttacatttacaagaattttctgggtaaatacagatagattttgaatatagatgaattgtattccttaatcatacataatttgaaagatttgttcttgtaatgatagcaccttatatttgtatagaaacttgttttctaaaacataaagcaaatatgtatattgttgtagaagcaattgttgtcaatgtatgtcactgaaaatgtatcctcatgttgcagatgggaaagtgggagcagatataaagggatttttctaagatcacacagatttagacattaaaaagtgaaatataatttttaaaagtctaccaaatccctttcattattcagtgttgtctcttaacgaactgttttgtaaattaacaaatctttaaaagtcatatctacttttacctatagttccttttccttgaaaatctgacgaataattcatcattaccccaatctcttggtgattctatgtgcatgtatgtgtgtgtgtttaatggttcagaagtatctatttttcttcttattctacttgtgtgtatgtgagaccagtctagtttaattgattgacaatttcacttaattcccccttccagccttagaagaactctgaaaagaataactcagtaggatgttcaccctttcaaacaggcttagttgactcctccatgtgaaactgtaaaacacacctactggaatgttttttgttttgtttttcttttaagcaagagaataaaaaatgtactctagttctattcattctcaggaattgacttctaaaggacagtcccattgctagatggaataattcctctgggaatcaagaagtgctctactacttaaagtttaaatggtaaacattaactttaatggactctcaagaatttccctattgattagaatcactttgccaaattaaaaaaaaagtgtgctctaattttcaataattattacacaaaaacgacagagttgccagaattccttttgtttagttttgtttcctattactcttaatctatattcctgtttaagacgtaatttttggattatgctactgatgggggaaggaatttgatttctgtggtggtgctgagcttcaacattatctccattgagttgagtggttggagtaaagtagagatgtatcaactttcaaacaaatgggacctggagaaaggctgctttcaaacagcaatgaaattcttcagcttttaagaagcataggaggcatattcatacttcttctcaacatttagttaaaatggaaatcctatcctcaacacaccaaatatgtataatttgtgatgctctgtctacatctttggtgtccagtatggtagtcatgaatcatatgtggctatttaaattcaaaatacagttaattaaaattaagaaatttgacattcagtttctcattctcactagctacatttcaagtgctcaatagtcttattataaggctagtggttaccgtattaaacattacagtcctagaacatttccttcattggagaaagttctattggacagtactggtaaagtagtttttggctattggatattactaggttagtagtttatgaaactaaaaagttcaggtttctgtgtcccaaaaccctagggaatctagcaaatttcaatttaaacattatgtaattggttctccattgcttccctgagcccaggactaaaaaatctttggcagctttcctttcctagttgagattatagccaagaatggcctgctaaaatcttaatacaaatatgtaactctaaactctgaagagagactctgggtgaagaaatttctgaatggcttagccttttattttgttttggattattttgaagtgagatcataacttgtagaatgaaatctttgagaacctaccatttaactgatttttagcagaaaaaaatgctaagagaaattatgcatataattcacagattcatacatatataaaaataaaatatcacatgggctgcagtggcagaaaataaccagaattgttaattatccttctaacttgatgaactttttgctcagtgccttttcttttttactaaaagttaaaatagaaccaaaatgaattgtttctttttgaaaagctggccgaaggtctaaaaagtaacaaatactaattgttctaagctgctttacggtgaatttcctttcatggtttaagggcttcaattcttatatccacatcattttgatttatatttattgaaacaggcaatgactttgcgtctgtgtatggctgtgttaacacaggtgtaaattgaaagtccacagatgtagtttgggcccttaataaataggctcggtgattatgacatttgttcctttctccacattcacctctcaaatccagcagacatacttaaagggggaataaatctcagctcacaaactcaactgtttaagggaaaaaaaaatcaaaccaaaacaaaccttcattttcaataaatcagctgttaatctgaatgagcaagttgtagggaaaaccttaatctccgtgactcctagggtttcccaggaaccttcaaagaattgccagtgtcccaccacctgaaaggatggcaaggtcccagtgtatgcaagggcatgaggtcactactgctccaaggctaagcccactgctggtggtggggtcacttcagggccagggtgctctctaggaccaagaggctgaccaaagttagttgcctggaccgttgtgtgtaaactgctgaactcacaggcttgttattttgtgctgatgctctgtttaacattcagagtgctattgcttgtttgctttcatttagatcagtttttaagctttaaaaatagaaaatagcgtataaaaggagcttttttgaccaaagaagatatacagatggcaaatacacatatgaaaaatgttctatatcatatgtcataaagggaaatgcaaattaaaataagataccactacacacccattagaatggccaaaatctggaacactgacaacaccaaatgctgatgaggctgtacagtagaaggaatgctcattcattgccagtgggaatgcaaaatggtacagccactttggaagacagtttggcagtgtcttgaaaaccaaacatgctcttaccatatgatacagcaattgcacttcttggtatttactcaacggagttaaaaacacaaaaccctgatatataattagatgtacacatatatatgcacatcatagcagctttattcacaattgccaaaacttggaaacaaccaggatatttcatcagtagatgaatgaataaataaactgtgataaactatgctacatccagacaagggaatattatttagcattaaatgagctagcaaatgatgaaaagacatgaaggaaacttaaatgcatattactcagtgaaaggtcagtctacaaaggctacatgctttatgattccaactatatgactttctggaaaaggcaaaactacggagatgagtagttacctggggttggggggaaggagagatgaataggcagggcacagaggatgttttgggtagggaaaattttctgtgtaatagcataatgatggatgcatgccatcatacatttgtccaaacccagagaaggtaaacaccacgtgtgagccccaatggaaactatgtactttgaatgaaaatgatgtgtcaatgcagatttatctactgtagcaaatgaaccatttgggtgccggatgttgatattggaagagactgtgcatgggtggggagatatggtagaactctgtaccttcttctcaatttttctatgaacataaaacttctcttaaaaattaagtctactgggcgtagtggcacctgtctgtagtcccagctacttgggaggctgagacaggaagattgcttgagcccaggagttccaggctgtagtgagctatcattatgcctgtgcatagccactgcactccagcctgggcaacaatgtgagactccatctctaaaaaaaaaaataaataaaggttacccctggcacattgcctatggtgtagccgtgctccacaggagcaatcaaaaacaaaaataatgaaagtctttttaaaaatgactttctgatgtatttttacacaagcacaaagttttggcaaactcgtgttaatattccttcattacccattggttggcacggattatgctttgcctgtgtaaattacagcacggagttgatgcctctttaaggcaaggggctctgccctatgggtttagtgctagtcattggctgtaggtttcactgcgggatcctgtggctcctgggtgaggcagctcttactcagccaagggaagttctacgcagaagggggcagccatgagccatcagaaaccaacgggcacagaaactgggccattggggtacctgcttggtagagggactgtggttggggcaccacccagagtacagcagctactataatatataagatctattatttagctaaaaagaatagagaagttattttcaagaaaaaatttaatttgaaagttttgtgtgtagtatattggccatttaaattttgtttcactgcatttaagataaactctatattgtgttttcagttcctagagccatacagatacttgaaaccacaactgatttgatttgaagtgtgatatatacaaatacatatatacgtatatgtgaatatgtgtgtctagagacagaaaccaaattcttgaatataacaggtgttttctaatatttagcaccagcacaactgaggccacctctggttaaaggaatcaacagcacaacaatccatcttaggtggtttccacctgaagaactgaatggaccctctcctatatatcagctggaaaggagagagtcatctctaccagctctgatgaccacgatgatgaaaggaatccgtttcataggaaatgggtattgtaaatttcccagctccactcacccagtcaatacagacttcactggtaagtgtgtttgacattgctttatttaggagacacgaagctccaaaatgttttctatattttcatatccctttacaatgaatttttattatacctacttagagaaatactaattcagccctttgatagcttttgcctgattgtttcagcatgtccatctttttagaattctggggaaaaaagtcaggtaagtgaaggaaaggaaaaataaaagatgaagatgaagaagcagccttattggatcaaagtatgtgctttgtatttgtctttttgtgaagtatgtgccaggacatgtttcttgaaatattattcactgtgttctctgagcaaatgagtttgcaaaatgccctcatgctattggagattctcagtatgcaccccgttactgaaactccaaaaagcattgtaagaaagctattcaactttgcttagctaatcatgcctaacagatatttgatgtaatgttttctttttctttctcttgctgtttccttcttctttttttcactgtgacaacttaatatctcatgttctatgaagaacattgtggggaaaactaatcccagggaaaagataacttctctaagccaggactatggtaaagcaagtgaggctcttgtttcggtcacaaaatttaaaggcactaaaaaactcagtgttaatgtaaattttaatgcaatatttttaaaaatgaaaatcaatgtgaaagcactataaaaatattatcaaaagcttaaataaagacagattgaactctgtaccagcacaatcctgcctcactggccttaccctcctcctggccttactagtaccgcaatattttggaagtcccatgacctctgtgacttacagcttctaatagcatgatttcaatatagctgtaaaaaaactctacttatggtacaccatttttccaatttttaaaaaaatttacaaagtataagatatatattattatgtaaactcataaagatgttcatttaatcatccatgagaaagtcattttggagcaaatagctagtctttaaaatattgcatatgtgaagacaatgaaatggaattcgagctataaaaatttgtattgttttatttttacttaaaatagtaaatagtttgcttttcattgagactggctgctgatgcaccttggtaatgaatcatgattatattctaactgagatatattgagattaatgcatgattaactactctctcagtacatcaaaatcattgcagagtattagaaattgaaccattgagctaaaaatgctcaacttctgctttatattcttaaaatggcaaaaaagaaaagaaaaaaaaggtaaggaaaaggaatacatgaataatagtaaaactcttttctcaaatgaaaatggaaactacctccctgatccaatatttggcttgagatgtgtttcttccaagaaatagcatccgtttccattcagctgggcatagctgctgcaaggatgtcagcttggatttgcaggctagccagcagacagatttttgatgggatcacctactgttgttgcagtgaaagatagaatggcccgtccaccgttaataaatttggtcatcctcgctatctcccttgctggccttatactctgaggtgcaagggctaggggcagatgcagtgtctgggaagttttccaaattcctctttaaaaaagttaggctgtaaacactggcctcactaagcaggatccttctgtctataacaaagcctccagctgcacagaaaatatgcttggagtacacaccatttgaaggacaaggcagggagatcacaattttggcttgaactactccctggagctttggtgattcctggagaatgagaagttcttctgtgttcaggcatgttctgggacattgctgatgccctttttagtggtagcttggctttacttttaagacccctttaacttttaatataaccatgtatatactaagttattggtttgatcctttggctgacttgccaggtttggctgaatgattttattgagttgtaccgaagcctaactaaatgtacccaattaatgagctaggacaggttttcaaaaccaactcaataactttctgtaaacttgcatctttcctaaatagagaggtaagcatataattagcatcttacattattcttactgatatattatcctatttaatccctctgcaaccctataaagtagctctttttaccctcgtagtacaggaggaaaagaggctccagtgagtgacttgcccattgtgccacagctattgaatttcagggtggaaacgtgaattggagccttccaaatttaaaggcaaggtctctgctacagggtggaaaggaacttttgtagactgttctttggaagtgatagaataggaagtatacaaaagtaagaaagagggataggaggtgaaataattatcacccaaatattccttatctgacactgctaaactttttggatttgtctttcagttagtttcagctcacaaacagcaagtagtgttggcattatttattcatttatttgtatccccaaagacatgtaggcatcaggtttttttttaatagcaattaaacccagagtgttactagaagctagatgtttaaaatataaataacattatgtgaaatgggctgaagtgttatgcgttaaaacagtgctttcaactcacattcctttatatttcattcagtttttatattctgaggcaaatttaatgagcaaatccttgaaacctctaatatgatgaattacattttaaaagttaataactttaagataaactaagatgtcctttgttttgaattattcaattcaaaatctcaaacttcaactaaaatgacttctgaatagaaatatcaattagtactcaaatacaaatataaggttgatgtacataattatacatattttatatatgaaaagataagttagattgtacccatcaatgacaggaattataaacgcattcataacacatttcatggccatgaacattatgttgcaagtctcagtaagaaatatctcattattgtagtacaagaaagggatctcttacacaacttatgcctctttcatatttgctttaaatatttttatcttacacaatagaaagagaataattcaagcatatgaatatatgtcctaaaatgttgtttaatattgtaaattaccaagcttaatactgtaaataaaccctgtcaatatctacctttgggcagaataaagaaccagataaagctattttgggacctatttttgcttccttttcttttctgatacaagtgttcttttaaaaaatctaatcttcaggaagaatgtattatcagtcatttacatcatagtttaaatttaaaataattaactctctgtatattattatgaggacttcgaagaagattaactgataaattactttcaaatccaggccccattatttattagctaaatgtaattagacaactcatttaatcattttttgtgcttctgtttccttttctttaaaattaacataattccactgacagtattggtatctagcaggtaggtgaggatttaaagtagatagcccacctaatgaactttgcacagtgcctaccacacagattatttagtactcattaaacattagctattagttattattcatttaataaatatttattaagtgcctactatgagacaggagctttcctaagtgagagtattctgcagttataaaatcagcattctattaatttatttgctgttacacatgcaaaatatgtttgctcaaatgttatatctagggcatgagtaatatgcaatattccatattaaaatgtgatacttaattttgctattgaaaatagtaaaattaattgacttagtggtgaggacttgggcaaactacttttctgagtgtctaatcttgctcatctattaaattgaggattttgttgcatgatcaatgttctaacctctaaaattccaattctgtgaacatagaatgtttaggaggccccacaatccaaaatacaggctgtaatcatggcatctgtgagttaaaaaaacacctagagtttaaaataaattgttttctataatattttgtttattaatacaatttaagattgatacaaatttactgcttttctctaataatttaagaaatttagtgatatgggcagagttcaacataaaatagatattcaattattgggtcatatcagatgttataaaaaaagcagaaaattaaaatagtttcgtgatcttgtaattgggcaatgatataaacaatcatggtgaaacagtgccccagttacatggggttaaaaatactttcttcttccaacacagaaatagcaaatagagcctcccctcccatatgcaactagaaggggatatcattgtgcctttggagagaaaaaaaaatcatgctcgtttttttcaggaatgcagagtaaatctacttgatttatacaaagaatttagttctttccttgtaatgctagtaatccaagtggaacctggtaaaaacagcaagtaaaatactgctcagattggcattccaaaggtgaccctctttctccttgtcacttattttttcctattagcgaaaacaggtccatgatcatttgggggaaggtttgactattgtagtatccagatgccaatcacaccagccttttaaactgcctttactggtgaccctgcccagaaatcaggaactgcctttggggagatctttgtagcaaaccactggggagatgagcacacacatgcacctggatataattcccttttatttgtcttcacgagaaatgtgattactgatgttgaatatcttgcagatgagaactctatacagtttcttcataataatgatgttcaaggacactaaatgattgtcatacatttttgtatcatagtattcaccttcccaaaaatggttgaactaaaatgctttagaatacgaaatgcaattaattaccaagggatgaaaaaagaaatgcaaccaccaaaaatcaatatgtttaagagcatattctttatttcttttactccataatatttatgccttattgttattagtcttcttatttttagtgaattgggacatttaagcacttcattaaaagaaagctgattataagcatttatagtgaaggtgcaagtagggcaaacttcttcagatagactaattagtaaaagcatattaattctgaccttcaacacccttggtgtcccactatttgttttccttggagtgggagcaagtattttgacagaaagcgcttgaaaaaaataaaaaacaaaacaactaaacaaaaccccagttcttttcaagacagatttaaatcacaaattttacctaacctttgatgttagatttcagccctagttattgaaaaacaaatataataatctactatgtgtcctagaagtttaatgaacaggcagtaattatactaaaaaagtaaaggaaagagtaagaacatggtatgtggcagcaaagtaaaggagaaataattctcaggcagtgacaaaactctgctgtgttttctgattatgaaacaatcagaagagatgagaatggttgagttaatcagtttggactgaggacaaggatcaaaatgcatatcttcttagaataacagaagtcacactgactcatgataactagagatatggagatgtaaatgtcaagactgtttattttttattatatttagtagagaggtataagtaagttctcaggaaatgccttcaggtggcattgatggcactgcgagatgggagaggaccattatttccccattcatcaactacatcataagaccaatttaagaatgcatgtgttttaacccttgccttttaaaagtgacttattttgaagtacattcctgtaagtctcccttttttttgaaatattaatgttaggtaactggtaagctgagccaacactgaaaacaaactgtttttgttagctgttagcagtattttagttaacttaaagcatctgtttttgtccatcactgttaaaatttttcaaaatgcattgtcacctgatatataaaccacacgtgtgttcctatatactcatcccacatgcataaacatatgttttccagaaggtctctgggttttccgcaaccactcaatgggttctccttgcccactgcctagacagagccagtttatcaagacaggggaattgcaatagagaaagagtttaattcacatagagcctgctgtatgggaaacttgagttttattattactgaaatcagtctcttggagagtttggggatcagagtttttaagagtaatttggctggtaaggggttgggaagtgggagtgctgattggttgggtcggacatgaaatcctagggagtcaaagctgtcctcttgtggtgagtcagttcctgggtgaggaccacaagatcagatgagccagtttatcaatctgggtggtgatagctatttcatgagttaagggactgcaaaatatctcaaacactgatcttaaattttccaacagtgatgttatccccaggagcaatttggggaggttcggaatcttgcagctggaggctgcacggcttctaaaccatcattccttatcttgtagcaaatttgttagtcatacaaaggcagacaggtccccaggcaagaagggggtctatttagggaaaaggctgttaccatctttgtttcaaaactaaattgtaaactaaattttttcccaaggttaggtcaacctttgcccagcagtgaacaaggacatattagagtttataagtaagatagagttatttaggccaggtctctttcactgtcataattttcttagttataatttttgcaaagtcattttcatttctatatagtctcaaatatacctgctcaaattgtccagtgtcttttctgccagtatgttggcattttggaatcttttcaaagacttcattgcttaaaaaaaatgctgttgcttaatgatattttgtatcaatataacacattaattttaatttccccttcattcagcttaaatgggttggaaaaggaactttgagcagaaaaagaatcataattggtcagcaatggtagtgaaactagcacctttgaagatgattgatttttgatttagtaagatgaattattttgtgtatgttttcttgaaaaaaattagttaaaacatttaaaaatgtatagttatagttattttataccagttacagcactcttgaagtgtatagattaagttcctttctattcagatagagaggaatctgggaacatcattgtcaaaatgccatctctttcaaaacttggttccagtgctctaaagaaatgttttagaagattatgcactaatgttactggcggcaaattcatatagatctgtagccacctcaatttttgcattctcagaagaaagaatttgattgaggggacataaggcatattaagagaccaagacaaattttagagcaagagtgaaaatttatttaaaaattttagagcaggaatgaaaggaaataaagtatacttggaagagggccaagtgggtgacttgagagatgatttgacctttacttggggttttatataatggcatgcttccgaggtcttgcgtcccttctcccctgattcttcccttggggtgggctgtccacgtgtacagtagtctgccagcaattgggagaagttgaatgtccagtgtgtttactgaagttataggcatgctcacttaaggcatgtttccttgccagttaagtgttcccagaaggtcatataccggttaagcgccaacattttgcctcttagtgcgcatgcttgagcccactcacccatctcctgagatctcattgggaagctgctgatcacccgtctcaggtgtttctatctatagggagactgcctttccctggcactggctgtgactgattcttattattttagagagatagtgtaacaattatcacctgacggttgcctgacatttctggtggggcgttgtggggggcggtgcttctctgaccctgcccatagtctaactgccaactgtaacactaacagtttcattgaagtgggggaaatgttaagtaataatatgaaaaccatatttaaggtatatatatataaggaggctcacaaacatagccataggccgtttgtttggagctttgaaaagggaggctcagttccttgactgatgagcagtttccatttggaaattctttgactttagtgcaacttcaaaataaaggcatgagacagaaggagagaggaagaaaccctcaagccatctaaagtcatctctggcaatggtggccatatcattttcacaaaaaaggggcatccttggggaatatcataaaggaagaataaggacttaagggaaatgtgtgggaatgattgactgatcctccctccagcagaaaattaaaaatcaatgtagatgcatttttctcagcttcttcccttcatttttttcctctcctgaaacctgttcctccttccgtgtgtaccatctacagtgaatatcactattgccttaggcggaaaccttggaactctccttgaattggcacttgaactattcactcatttcctcccattctattaatgattcctcctctggccgttcttcctcggatacatctcttggaactacctgctggtcctacgctactgcctagtccagacctatgttgtgggcttctctgccaacagtttcaatcttctccaggctgttcttcaaacgaattatttttattggcattctcttgtgtaaaaccttttaatggtttcccagcgagagatgcccttcacaaacccttttctgcttacctgctttctacctatatacctcctcatctctcccaccaaggactggtatactctctagctctagaccattttttagtcccagtgcttgaatatagcacactctctcagatgcccatctctttgaacatattgatacctttgccgggtatgccctcatctatttgcaagtacttcgctttcctttcacctggctaattgctactcatcatgaaagggttagcttagctgttcccctaaataaacttccagcaaccccagcctcctcccatgccaaatctgggttgaggacctctcttatgtactactatagaaaccaacaattactctattttagctcttaccgcattctattaagacaggttgttcagggagctaagctatgaggacgcaaaggcataacgatgatacaatggactttggggactcaggggaaagtgtgggatggggtgagggataaaaaaaactacacattgggtacagtgtacactgttcaggtgatgtgtgtaccaaaatctcagaaatcaacactaaagaacgtattcatataaccaaatactgcctgttcccaaaaacacctgttgaaaaaaaaaaaaaactggttgtttgcttatctatgtttcatgtagactgaaattatgactatctttttcatgcttaacacatttgtgtcttgcacggcataagacatttaccagatactcaataaatatttattaactaaatgagtgatagaaaagagggaaatccaaaagatggatcacttagctgtaagaattatttaatggcaaaattcattatgcttttgaatatagttcacatttttaaatccacgtttttgaaagtattgatggtttagagtgataactcaatttgtttagtctctattggccttagatgtgtaagaaaatacattttaaactgtatagtaccagagacaaaaagaaatttcttgttaatggtcctcagttgctggcaaagttacttgtacaccagttgttatagctagagtgttatatcagaaattgttttctgccccaccatagctatcacattgtgttgctgaaaactaggtggttgcacatctcttagatacatgatctccttaggcttattaaattttgaggttaatgaatattttgacacttttacctatacatatcattagggcttattgcaataggtttaagatgacagtcataataaacatatacagtacaataaaaagcacttttaatcttgaaagtgctttaaaaacaacagtgatcaatgctatggatggattaacagcatcatgctgattgaattctatttcaaggacaatggaggtattgatgttggcagtctagttcagaaagtggcaatggctgtagtaaatggtgcaggttctggagtcagactccccaggtttcaaatctggctccccaacatgctggtgtgcgactttgcacaagtcattcccccagtgtgaaactcagtttcttcatctgttaaatggcttattgtaaggtttcaatgcaatcactgtaaaggattagtacacagtgtcttagtattgtgtatgcatttgtgaccagcattctgtaattctggacttcaattatgtgcctttccattgcatacatatattttatgtccctaagtcacataaatcttgttgatacttctttatgacctctctctactacacggtactctgatcattcactttattttactcattctgtgaacctctgacctgttttttgttgtcattgttacctttcttcttccactagaagcatacatgttctgcatctcatttctccacatctatttaaacagccaactttaaatgttatgtgtacttataaacctaactctattattccccctgtcttcataatcagtcttctcgaaaactaagactctctatgtgtcattttctcatggatcaattactcctcaatctactgtcatttggattcttttcttccacttctttattgtaaatactttcttctagattatcaatagttttcaagtcagagaactttccttaatcctcaccctatgtgccaataaataatattggtgccattttttccttttaaaaaataagaagaaactaaatatttctcactaggtttctccttctattttccctaaactgtgtttcaagctttgatattgctttctacatccacctttaaatggaagagttcaatcactcattcggttcgtatgcagtttttccttatttcactccactagctgatgttatgattgctgtcgtaaaaaggatactgagcaacacaagaatgattcctaaccttagggagcttaaagtcttgcagtgaaatcatgcatcaaacatgtaattaagtaattacaagtgacttctgtctccagctatgaagcatatcaaaaaatcctcctgctgagaaaagaaatagaagctggaaaaaatttctcaaaaatatggttaaagacataagtgagtaacaaaggcttctaggacttgtgggatcaagatcctagatataagaaaaaccatgtaggtgagccttttaaattatctttgtttttccttctgttttgtttgttaattcctctattgcatagtcttagggaaaaaaaaaagacaggcaaaaaattagagtctaggtggggtcctggtatacatgccaggttttcaattgaaatcctagaagagcaaatcattaataggctcttcttcctcagataaagcctcaattattcttaactactaattatactgagataaaagttatttttttaccaaaaatatttagatatttgctgaaagatcacatcaaccagagtcccagagtgtgcaattttttcctatacaatgtcgggcattcaatcaaatattaacaggcataccagaaaatagggccaaataaccaaaagataagataaataaaataaaaaatagaaacatatcctcaagtaattcagatatatggaaatatgtatttgcatacacacataggcatatacacacatatacatgtagatatatatgcatatatccagacacagactttaaaataactataattaatattatcaataaaatcaatgaaaatgttcagaatttaagtagcaaatgggaatatattagaataggaattttagagcggagtaacagctgaagttagcaactcagtagataaaataccaattccatccctgataaagtaaatagccttgttcttaatatcgtatgcaacaatgtaagttgggaacaaaatatatatgaaacacctatttgtagccaatatatagcaacagtgcagagctattatgcttaagtgaagaaaagcaaatgaactgagttgcacacacctggaattattgagctcaagcagagacattagtatatctggtaaaggaataaaaactggaattcagggctacaaaagtagatttggagggtaggttcccagagagaagattgatgctgaaaaataattcaaaaattctgtgtaacaattcttttttgggtgcttggccaacatttagaataatcctatgagaaacatagtagagaagatctgcttggtagttggagctaagtagagatttcacaggcaacatagagctaaggatgcacacatggagtttggacttaaccacagtagagaaaccttggtgaatactctgagctttcactcgactctccaaaagtccgtcctttatgagtaaattcccatgctttaggaataagggctattctttaggaacattgagataattgaaacagattcaccctagtgaagcctaaagccaaggctgagtaaggtcgaggtaatctggtaattttacttcccgtcaaaacagaattttgtattcattagtaaaaggtaaaataatccagaggttttactatgcgtcatccatgaagtgaccaataatgaaatgttaatagtcgatagaggcagacaaagacttcaaaataacttcagttaatgttaagagaaaataaaggacaaggtggacagaaaggatgataagataaaaaatatttcaatgcaaaattgaaatctgtacagtaattaataggaaaaaatggtatgtaaagtaaaatacctgaaatgaagagaatattgataagttttgccaatgaaacattgcagaaggcaagattagagaactcaacggtcaattgtaattgtccaaactgaagcatatcgagaaggaaatgaaaacatgaaaaaaagaacaatgaggtatttgaggacccagaaggaaagagtgaaagaatgagacaatagtaatattgtagaatagccaaatattatcaaatatgaaaaataagttcacacatagtttaacaaagtttagcaaaccataaggagggcaaatataaggaaagccatatccaggtatattacagtcaaattgcttaaaataaaagacaaagaaaaaccttcaaaagcacctggggagggtggggagacttattaccttcagtggagcaaaaataagaatgatgtctgagttttcaacaacaacaataaatgaatgccagaatataatggaatgatactttttaaatgctaaaattatttttttaacaataataacaacaaaagaaaactaccagtcaagatttctgtacccaggaaacatatccatcaaaaatgataaaataaaatatttttcttaacaaaagagttgaaaaaagttatcatcaaaagactggcattataaaaatcataaagtgtattaggacataggaaaagatcccaaaaggaagcacagagctgcaggaaagagtgcaaacctctagaaatggtaactaggtgtgtaaataaaaagtaatatttatgataaaaggcataaaaatcatactttgaagttgataacatgtaagaaaaaatgtatgacatcaattattttgtcacaaatgatgacggggtctatatggagctaaactgtggtaaaattcctaaaaagttatggaagttgaagaattaataatatgaagtaggccatagtagatcaaggattcagattatgatgccaaaggtaacaaccaaaagaatgatttagaaaattaatgtaaggaaacactaaatgttaaataaacacaggttaagctgataaaggagtttgagggtggcaagaagaagccagaaacaaagagcaaatgtggggaataaaaggacaaataccactgtggtgaacataaactcaactatatcagtagttgcattaaatctaaatagtctacccaaataagcataaaagttctcagattgatttaaaaaataaaaatatatgttgtttattcttataaacatactttaaatataaagacaaaattcgaaaacaaagaaagagataagatgtattgatatatagatagattttaagacaataaatgttagtagacaaaatggaggacatttcataatgacaaaaagatcaattcaatagagggacatataatcctaaatttaggtgctacttatagtttcagatatgtatataaaactgaagttgacagaaataaacagagaataaatatatcctcatagttgaagatataaatccccatctaatattttgacaggaaaagtacacaaaatattagtataactatcaaagatttgaaaatgaataaacaattacatctgtatataaaacatgtgacattttataagtgttgtcatatgtagaacatcacttccaacaactatataatatgcatttttgaggaacacataggacattttccaaatagttaatatcctgggctatagaaatcgcataatttttttttttaagagacgaggtcttactgtgttgctcaggctggtcttgaacccctgggctcaagcagtcttcccacttcagtctcccaaagtgttaggattacagatgtgatgagccactgcattcagcttgatctcataatatttcaagttctctgacaactgtgagattaaactagaactccaaatctaaaacataatccgattggaaaatatccctggctcaaaaagaaattatggaaattaaaaattatttttatctaatgataataatgccttaatacatataaaaacattgtaggatggacaatatcaggaatctgatattgctttatagctttaaatgcatatattagaaaaagggaatagttaacaatcaattagcttcccactcaagaagaaaccaggaaattaaagcagcatatgacacccaaaaaatatttgaataaaagaaattataaaaataagagaaatcaatgatatagcaaacagaaatgtaatggagaaaataagaccaagaattgattctagaaaatttggggaaaaatttctttgcaagtgatcaaggaaaggagaaagtacagattactactctcagggatgcaaagagccattactagaaatcttacagacattaaaaaaaataataatgtattaagaacagcactacgctaaaaccttgacaatacaggcaaaatacagagatcctttgcatgggagaaaaatctccaaatttaaactgacacaagaagatctagaaaatctatgtggtcctagatgtgttttaaaaatgaaatctatagttaagtcttttacataaagaaaaccccagggaaggtggcccgattggtggatttcatcaaacaattacagtagaaataatagcaatcctacaaaaaaactcttacagaaaatagaaaattgcaatggtttctatctcattttatgaggtcagaagaacttatacactaaaatctgacaaagaaattaacataaaggaaaacacaggtcaataataatcacaaaagtagattctaatattctctgtgtgtgtgtgtgtgtgtgtgtgtgtgtgtgtgtacataaataaaatgttatatcatgaccatgcaggttttattccagtagtgtgtaatcttttcaaaatgtatgtgattcaacacattaacatagtaaaaatgaaacattctaaattatcaccacagatttaacaaatgcatttaataaaatataataactattcataacaattctcagcaaactagtaatgaaagaacacatcctaataaattgtttttgtaaaagacctctaatagtaaaatatcaagtgctttttcccagaggtcaggtacaggacaaggaaattcactatcaccacttttatttaatgttgtactggaagtatagtactagccagagcaatatagcaataaaataaataagtattaggtatgtcaaagaagaagtaaaccatctttatttgtagatgtcattatttttattgatgtcaaaataatatataaactattcagtttactcagtaaacttagaaaagtgtcgaataaaggtcaatgtacagaaatcaaatgtttctattgaatagcaaaaaacaagtagaaaatgaaatgtttaaaagtaccatgcttactagaactaacacacataaatgacttagaaacaagtctgctaaaaggtaatgtaggacctccactctgaaaactacaaaaaattactgtgagaaattaaagaccaaataaatggaaagttacgccatgttcatggatctaaacacttaatattgttaaatagcaagtcttcctagtttgatctgtagaatccatatagtccctctcaaaatcccaggatttctgtaaaaatttacaagctaattttaatatgcacatgagagaggaaagtacttagagtagccaaggcaatactaaaaaagggcaaagtaggaaggcttatgtatcaagactaactataagactgcagtaggtaagcatgtatagtataggcaaaagaacagataagtatagtaataacatattgccacataaataccccaaataaatacatatatatgcagggcacagtggctcacacctgtaattccagcactttgagaggccaaggcaagagtattgcttgtgctcaggagttcaagactagcctgggtgacatagtgagacctcatctctacaaaaagctgaaaaattagctgggcatggtgaggcacctgtagtcccagttactcaggaggctgaggtaagagaatctcttgaacccaagagttcaaggctgcggtgagccttgattgcaccactgcactccagcctgggtgacagagcaagatcctgtctctaaaaaataataataatacatacatacatatgtgctctaaaaagcacatgcaaagttgttcatagcaactttatttctaataatcaaaaactggtaacaatccaaatttctatcaacagtagaatggataataaattataataaatttattcagtggactgcatatagaaataaaaatgagccaactattgcttcagagaacaatgtgggtgaatcttataacctgttagtgagtaaaagaagctagaatctaaagagtctagtattctatttatataaatttcttctttttcattttaacatttattttaggtataatgggtacaacatgcgggtttgttacttggctatattgcatgacgctaacgtttgggctatgggttccattacgcaagtagtgagcgtggtatccaataggtagtttttccaattacagtcccctccctcccttccagtgtctgttgttctcatgtttatgtccatgtgtgctcaatgtttagctctcacatataaatgaatatgtagtatttggttattgttccagcattaattcacttagaattatgaactccaactgcatccatgttgctgtaaaggaaatgattttgttcttttttgtgattgggtagtattccatggtgtatatgtaccacattttctttatccagtccatcattgatgggcacctagattgattctgtgtctttgctattgtgattagtgtagcaatgaacatatgagtgcatgcgtctttttggtagaatgatttatttttctttgggtataacaggattgctgtgtcaaatggtagctctgttttaagttctttgagaaatctccagactgctttccacagtggctgaactaatttacatttccaccaatcgtgcataagcattctctcttttccacagccttaccagcatctgctgttttttgactttttaataataaacattctgactagtgtgagatggtatctcattgttgttttgatttccatttctctgacaattattgatgctgcacattttttcatgtttgttggttgcttgtatgtcatcttctgtgaagtgtatgtttggctgggcgcggtggctcacacctgtaatccagcactttgggaggccgaggtgggtggatcacgaggtcaagagatcgagaccatcctggtcaacatggtgaaaccctgtctctactaaaaatacaaaaattagctgggcatggtggtgtgtgcctgtaatcccagctactcaggaggctgaggcaggagaatcacttgaacccaggaggcaggggttgcagtgagccaagatggcaccactgcactccagcctggcaacagagcaaaactccgtctcaaaaaaaaaaaaaagagatagaagtatgtgttcatgttctttcccattttttaaatggagttgtttttcttttgttgatttgtttaagttccttataggttctgcatattagaactttgtcagatgcataatttgtatattctgtaggctgtctgtttactctgtggatagtttcttttggtgtgtgtgcagagacactttagtttaattaggtctcagttgtccatttctaaagctgcaaagtgaaatcagtggtgacagaaatcagtagatggggtaataactgaaaggaagcaaaaagaagccctctgagattctggaattattttataaattagtctgagaggagtttataagtgtagatttattttgtaaatgtccatcaaaatataccttgataattagtgcactttatttttgttatactttactttgaaaagttactgaataaatgtttcaagcctgcaaagtccaaaaataagatgtgaaaaaatactgtaacataacagaagcactcaacccagtctagaggattagtgaagacctctccgaggatgaggcaagttgagttagctaggccaaaaaaaaaaaaaaaaagaaaaaaaaaagaaagaaagaaagaaaaagaaagaaggaaagtaaaggagtccaggtagagaaagtatcatgtatcaatgtcttaatgtgggagatgacatgtacataaataaacaaattagtaagcaagaaaaacttggaaattctaatataaattagattcttgccagaagggtgcatggtgaggctgaaataaaaaaggggccagatcatgcaagggccatcacattgaaaattttgaacgtaattttattcatctttataagaccactgtggaggttacagcctgataccaagaatgtttttaagaagggcatgctgatattttcactgatattgtacatgtaccattcatagattgactcactaaaagttgcaattttatttaatcatctaataagattatttatagaatgtctgcaaaatgttagaagatcttccttataagaattagcatagctgaatggtttaaaaaaaaatgaaattctgaatcccagcatggatctattgcattcttgcaattgtccaaggcaaaaggttctgcttgcctgcttcataaacaaaatcaattaaccgagactgcagcattgcagtaaaaagtttaatttaagccaagccagccaagtggaagaactggagttatcactcaaatcagtctctctgaagtcttgaaggttaggatttttatggataatttagtgggcagaggggctagggaatgggtgctgctgataagttgaagatgaaatcataagagcatggaaaatggtcctcctgtattaagtctgtctctgggtggggcaacaggatgggttgagtcatgagtcattagtccaggtgggatcagtttgaaaaacatctcaaaaaagcaatcttgggttttacaatagtgatgttatctataggagcaattggggaagtcaccaatcttgtgacctctgaccacattattcctgaacagtaagcaattataaaaattacacctacattttagcagcattcaggcccctcccgtaatcctattcttgtggcctttcattagtcttatgaaggtggtttttagtctctgagaagggaggaggttagttttagggagggatgatcatctatgatcatctttgctttcaagttaaactatgaactaaatttctcccagtgtccaggaatggccaaagacagcttgaaggttagaagcaagatggagtcaactatgtcagatttctcttactgtcgtaattttgtaaaatcagtttcatcctaatctctggagaagtacctagaaatttgcatttggataagatatacagatctacactattaaagacagagctatcttacccacccccaccccagctatttgtctaagggaaatgaaacaatttgtacatacaaaaggctggcacacacatacgcattgcgcctacattcacaagagccagaaactggaaacaactcaaatatccatcagtaggtgaattgattaataaaatgtggtatatgtatgtgatgaaatactagtaagcaatacaaaggaaagagcagaagaacacttaatcgtaattccacttatataaaattcttaataataattaatgtatagtgacaaaaaggagatcagcagttgcctaggcctgaggaggagggggtgatggaaatgctgtgtaacaatcaaggtagtggttttacaagtgtgtacatctgtcaaaacatatcgaactgaaccatttaaacagatgtgcttcagtatatatgtaaatttttatctcactaaaattaataaaatattctccaagtgattcttgcaacattcaagtatgggaaccattgatttacactgtaatgaacaagttgctttaactttgtttggaaaccaaacaattttaatattattttaccatttaaattctgagctctttcagatagaaacttaagcagtgtgtatactgcttatcactccaaatttcacctgaaacaaattggtatatactgtttgtcataaaaataagaaaatgactttcattaaattatgctgacaatgagaatcttgtacaatttcaatgaaataactttttttaatgaaatagggtttcttttgatctcattcacattcagaagggaatttttgtaaatagaaaggactatattttattttatcctaagaaggaatttagtcagtaaaaatatgaaatagacacttgagtatacagttgaccagttattgccttgaagctactgcacctctgtaatgtatttttcatagcttatataatccgtgttaatatgctacattattaagttcaactgtgagaaatatagttgcttgaaaacagatttcttctgcatacttataaattcagtagttggaaaaaaattaaagaaatataattaaagattgcaaaatcaatttgaccctcacttaaaatgtgttgagtggaggcagcaagcagcagcctacatctgatgctgttctctccttgtttacttcacaaaactgtgcaaattagaactttaatttacagagctgttaaagcctcattaaaaactttcagcaagtatcctattttgagggtttttttccccttatatctaatatgcagcattatctctgttttgtgggcatgtatgaggcaatatctataggcatattaatgtaaactgcatatatgaaatgaaagtttttcacatggaaaggacactagtggtgtctgtcaattgcttcccaaagtgattaatttctccatttacttggtgtttattggcatctactaacactggatctctgttggatcataggaatataattgggctccagtgaaatgggagaattccctgacaccctgttgcaggatatgtgacagaggtgtggcttgtctgcttgaccgccttgcactcaaactccttgcaggagagggagcatgcagatgggcaggtgtgggagccagggcaagaacttttgggctccagtcccatggtagtatctaggggtgggtgcttgtgactcccaaagccccagtgggtgtgttacaatgcccttttagctgtgccatccacatatggcttaagtgttaaccagctcagtgctttcttggtacctgggttcttgtccggtgtccaagaagaatcaggttacatggataaactgaaggatggtaaatgtgggggattttattgctggatggaggtggctctcagtggaatggatgggaaactggaaaggggatggagtgggaagatgatcttcccctggagtttgggcatccggcggccaatctcctctctgactaaccccagccgaaatcctctcaatgttcagatgctccttttcttctcttcttctatgtggcactgctctgctattctcctgttcctctgctcttctgctcatggagcctggggtttggggtttatatgggtataggatagtggggcatggtgggccaaaaggcaacacttgggtgtgaaaacagaagtgcctttttttatttagggctgtgggtttccaggcttcagggtggggcctttgccagggaactgccctcttctacccagcatttccctgcctcctgtctttatcaccagtagacttgttccctgctcttacaggatttcatgcgtgtccgtgtgaagagaccaccaaacaggctttgtgtgagcaataaagctgtttatttcacctgggtgcaggcgggctgagtctgaaaagagagtcagtgaagggagataagggtggggccgttttataggatttgggtaggtaaaggaaaattacagtcaaagggggtttgttctctggcgggtgggagtgggggtcgcaaggtgctcagtgggcaggagtgggggtcgcaaggtgctcagtgggggtgatttttgagccaggatgagccaggaaaaggactttcacaaggtaatgtcataagttaaggcaaggaccggccatttacatttcttttgtggtggaatgtcatcagttaaggtggggcaggacatattcacttcttttgtgattctttagttacttcaggccatctgggcgtatacgtgcaggtcacaggggatgcgatggcttggcttgggctcagaggcctgacattcctgccttcttaataagaaaaataaaacaaaatagtattgaagtgttggggcggcgaaaatttttggggggtggtatggagagagaatggacgatgtttctcagggctgcttcaagtgcgattaggggcggcgtgggaacctagagtgggagagattaagctgaagggaggtcttgtggtaaggtgtgatattgtggggatgttagaagaaacatttgtcgtatagaatgattggtgatggcctggatatggttttggatgaattgagaaactaaatggaagatacaaggtccgaataaaagaaggaaaaaaatgggtattaaaggactaagaattgggaggacccaggacatccaattagagagtgcccaagggggttcagcgtaattacttgcttggttggcaagtttttgggctctatccttgagtttttttatgttgtcatacaccaggccagattgatttaggtaaaaacaacactcctcatttaagaatatgcagagtcctcctttttcagcattgagtaagtcaaggcctcggcggttttggaggacaactgcagctaaagagtcaacttgggcctggaggactgataaagtttgtgatatgtgtgtgatgctagcagagaagtcattagacaggctacagaaggtcatgacagacgttgaaatgcctgctattccagtaccgagagcaatcatggaggcagaaagtcctaaaccgaccatcaagggaattagtggaataactcttttttgtcatgtcggtgtcatgaggggaacagggagctcttcggtcccatttgcaaattgaattttgggggtaaggaagactagtgtacatgtggctgtccaattggcaggtagacacatgtaggtagaggatccacagaggaagaagagaccttgtgcgaggcaaaactggagatgtaaagtaaaaaggtgagaaggagtgctgaaaggggtgtcttgtacccagactcctagggatccacctagggcggcagctgtcagaggttgtaatggggactgatggggtaactgcgtagagggggaggttcgattttcatggtgtatgagaaaacgttgagtatctacgagcaacctttcactgttattttcggggctgggtataagtaaacaagaagagggcctgggaggagagtctgatgagcaaggggaaggtagccaaggatggagtgaaatacagggcacgtgtcttcctaagcaataattactgctaatgtttttaagtttgtcagtattgatagagggcttgtctgtaatatggagctggaaggctccaattgtttcagtgatgtgtgtagttggacttcggagatgaagagtaaaggaacatcgagaaggtgaaaggttacccaggggaattccagtgggtctttgccgagagatacataaaggagcagccacaggaatagtagtttgtgttgtgagaggtccaaatatggggggagtagagttaatataaggagaaaggttttttaaataagtgcgaaggagggcggcagcttgctgatgtgaaatgtctggggaagtcttgctgaacctgtctagaaagtaaatgagttcttcaggagggtaaaggtgagggctgttaaaggaagttcggaggtgtagggagacgggagatgttgcccagtctgtctgtaagacggggacagctgtgtaggcactggaagaaagggaaatgcaaagccagcagttgttcgctaaggagggattagaagcagctaggagagaatgggttaaggttgacagtgtggtggagatagctggggagaggtagagggtgacataagaatgggaatgagaataagagtgagtataaaagtaaagaatagaacttcatcagggtggaagtattggagggtgccttgccagcaaagatcatctatccactttaagagggagttaagagtggcagtttggggatagcaccaagagatatcagctgtgatggcttgaagaaacagtgtaaaccagcagtgtaaacaagagtagggcatttataagtagttgagaatggagaataggagtatgaccggacagaagatagtagggatgactagttttttggggctcggcctaagtggtggggtgacttcgtaaagccctgttgcaaaaagtagggtaaggacgaacagacctaatagaatgaagggatgtattaggctcataagggttattactgttcttcagaaatacgagtgagtttaagggaagtgggggagagtacttgcgacttccaggaggaagaggagggattaggctggctgtccgatggacacagctttattctggaatggtgaacccagtggggaggatcctgcaggcggacggcagtcggggtactatagatgactaagtagggtccggtccattgaggttatagagtttgaggggtcagattcttaacaagaactgatcgtccagctaggttgtcttcatatggctggggatctggagtaggcaagagaagattagcagcctggcgaatttcctgtctagcctgctagagcactggaagatagtagcctagagggctggtgtctgggatgaggttggggccaagcaagaaagtgcgtccatataaaagttcaaatggactgtaccctgtagcatctcggggacaggctctgactctgagaagagcaagaggtaaaagtactgtccaatcctttttaagttggaggctgagcttggtgaggtgtgccttttaaaagaccattagtccgttctacctttcctgaagattgaggacggtaaggggtatgaaggttccactgaataccaagagcctgagaaactgctttggtgatttggctagtaaaggctggtccgttatcagactgtatagaggtgggaaggccaaaccggggaattatgtctgacagaagggaagaaatgaccgtggtggccttctcagacccggtaggaaaggcctctacttattttgagggcctctaacagtattaaagcagcggcagccgctgcacacagacatgagggctaggttaaaacagtaaggtcaagttgtttggacagaaaggctacagggtgtggtcttggctcttgtgtaaaaattctgaccgtgctaaccatgcctaggaaggaaaggagttgttctgtagaaggtgcttgggtttgagagattagtcggacaggattggcagggagagcacgtgtgtttttatgagaattatgccgaaataggtaacagatgaggaagaaatttgggcttgattgaagtaatgggggctgtctgtgaagctttgcagcagtacagcctaggtaatttgctgagcttgatgggtgtcagggtcagtccaagtgaaagtgaagagaggctgggattaagggtgcaaaggaatagtaaagaaggcatgtttgagatctagaacacgataatgggttgtagaggcaggtattgaggataggagagtatatgggtttggcaccacagggtgtataggcaaaacaatttggttgataaggtgcagatcctgaactaacttgtaaggcttgtctggttttaggacaggtaaaatgggggaattgtaaggagagtttataggctttaaaaggccatgctgtagcaggcgggtgataacaggctttaatcctttcaaagcatgctgtgaggtgggatattggcattgagtggggtaagggtgattaggttttaatgagatggtaaggggtgcatgatcggtcaccaaggagggagtagaggtatcttatacttgtgagttaaggtggggggatagaagaggaggatgcaaaggaggctttggattgggaagaagggcggcaatgagatatagctgtagtccaggaatagtcagggaagcagataatttagttaaagtgtctcagcctaataagggaactgggcaggtggggataactaaaaaggagtgcttaaaagagtattgtctaagttggcaccagagttggggagttttaagaggtttagaagcctggccatcaatacccacaacagttatggaggcaagggaaacaggcccttgaaaagagggtaatgtggagtgggtagcctccgtattgattaagaaggggacgggcttaccttccattgtgagagttacccgaagctcggcgtccgtgatggtctagggggcttccgaggcgatcgggcagtgtcagtcttcagcccctaagccgagaagatctgggaaggagtcagagagccttgggccagagttccaggggctctgggagtggctgccaggtgagttgaacagtccgattttcagtggggtcccacacagatgggacgcggcttaggaggaatcccgggctgcgggcattccttggcccagtggccagatttccagcacgtgtagcaagctcctgggggaggaggttctggaggaatgcctggccgctgcggttcaggcgtttggaagttcttgtgtgctggagatgtggctggggtttgtctcacagtggaggcaaggaattgcaacttttttctattatggtacaccttgaaggcgaggttaattaaatcctgttgtggggtttgcgggctggaatttaatttttggagttttatttaatgtcgggagcagattgggtaataaaatgtattttgagaataagacggccttttgaccttttagggtctagggctgtaaagtgtctcagtgttgctgccaaacaagtcatgaactgggctggatttttatatttgatgaaaaacagcctaaacgctatctgatttgggataaagaaaaaggagcattaaccttgactatgcctttagctccagccacctttttaagagtaaattgctgggcaggtgggggagggctagtcacggaacgaaactgtaagccggaccaggtgtgaggaggggaggtgataaaaagattatagggtggaggagcagaggctgaggaagaattgggacctagctcggcctggcgaggaacaacctggggaggaagggagaggtcagatgggtctgtagaaaaggaagattagaaagactcagcgatgcttggggttggtactgaggggacaggcaggagggaaagaaggaagatttgggatgagtttaactggtcacagagactaggaagggactgatgtgtaaaagaatgcctggatgtcaggcacctcaggccatttgcctattttatgacaagaattatttagattttgcaggttggaaaaattcaaagtgccattttctggctatttggaactactgtcgagtttgtattggggtcaagtggcattgcagaagaaaataaggcatttaggttttaggtcaggtgtgagttgaagaggttttaagttcttaaggacacaggctaaaggagaagaaggaggaatggagggtggaaggttgcccatagtgaaggaggcaaaccctgagaaaagagagcatagagacacggaggaggggagtggggttcttgccctccagaaaagcagagagggggttgggacacggaaataagggattggggcacagagataagaggtcagggtgcggaaataagggattggggcacagagataagaggttggggtgcggaaataagcgattgggggtttcttgccccctaggaaagcgggacttgccgctaagggtgaaggagaaggggttgaggggtacttgcccctgccccaggaaagcgggacttggcgctaagggtgaaggaccaaggcaggtgtccctgcgtggtctgacacccttgaaacgtgagtgtataatcagagaggtgtccctgcaatgattaaacaccaagggaaggctgccttcccagtctgtgaccagcgccggagttttgagttcacggataaaacatgtctcttttgtctctaccagaaaatgaaaggaattgaaattaagagaagggagagattgaagtgtggcaccaagattgaaaggagaaagcggttgagggatagtgagggaggttggagaagagagtaaaaaaggccgcttaccggatttgaaattggtgagatgtttcttgggctggtcggtctgaggacctgaggtcgtaggtggatctttctcacagagcaaagagcaggaggacaggggattgatctcccaagggaggtcccccgatccgagtcacagcaccaaatttcatgcgcgtccgtgtgaagagaccaccaaacaggctttgtgtgagcaataaagctgtttatttcacctgggtgcaggtgggctgagtccgaaaagagagtcagcgaagggagataagggtggggccgttttataggatttgggtaggtaaaggaaaattacagtcaaagggggtttgttctctggcaggtaggagtgggggttgcaaggtgctcagtgggggtgctttttgagccaggatgagccaggagaaggactttcacgaggtaatgtcatcagttaaggcaaggactggccatttacacttcttttgtggtggaatgtcatcagttaaggtggggcaggacatattcacttcttttgtgattctttagttacttcaggccatctgggcgtatacgtgcaggtcacaggggatgcgatggcttggcttgggctcagaggcctgacacaggacttgtgggaatataatccatggctgtttgactactctgaactgttatactgctgtttttctgcccagggggatgttaaagccaaaagcaagtaatcaacaagattttttttaatcttaaaatactgaattaagccttaacctttaaaacaatttttgttgtagacatagatttgctatttgtttcagacatcctttaggcttttgatctagcacatgactaccccttcttaccgcattgcccctggatcccccaaggagagacacatggctacctcctttgtaccttggcccttgctgtactgatcacagctagttaggacagctatgaaagcctgctccatgcagaactgattctgttcgcatgagaatttggaattggaatttagagctaaccagttggtctgtgtttgtcctgaacataacataaaaattaattgaaatgagagacagagagaggtgtattgttgtgggggcgggtgagaaagtagggtgagggaagggaaggagggaatgctgaagtatagagcagagagcagcagagaggtgagaaacaggaaaacattcctcaaagcttctccactcccagtccaggaatcttgcctagccttgagttacagaacacactgttatctctggataatacatttcctattttgctcaaagtcctggtgtgaatatgcaaccagagatttttaacgtaaaaagaagctatgagcatatgaatggaagttgaagacctgagaatggactaagggactcagggttagggacagaccctaggaggaaagatggcattcagagatagatagttaaaaaacaatcaagaaaaagtagccagataagtaggtgaagaactgcttgacaatcaaggaaagattggtgaattaggtaatattcatttgcataaaatgttgcccagtggtcaggtaggcgaaaagctgaatataggcagttagattttaccatttttatgtttctatcccctgctacctgactaaactattttcaaaatgtattttatagcttagagccttcccaaaattcctagtattatatataaatttccaatacatattgatagctgaacaatcatattttcctggggtttattttaataatatatgcatttattttagccaatgatattcacaaagctttgctgaaatgtgttttgtttaacttggttctgtatatttttccatgaaaagccatactaaaaggacattttccaagtattaaaaaaaaaagcaaaaaaccctgcagtccagaatgcataatttgttctgggatagttaaaattctaagagaagtcttctttgttctttccttgctctttctttgttctccaaaagggtcgtatttaaactatgggtcatttctcatctgaatagccagggaagattagctacattgctactgatgcacttgatattttctcattacataacatgtggccacagattctagccagtctgataagataaaatgttcataatacttagaagataaaagggaatcatcactacttaagatccctttaaatccaatctgttgatctgtatgagattacatttttggctctcatttactagttccccctaaagaaagtcttgatatagctactgggttcctggcttgtattttgatagtcaaaacggcagtctggatatttttctactcagtagatacaatagaagaccaaagcttcttgcattgtagtcactgaccttgccatgtcatttcatattttctgtagatttggtcctggaaaatcaaatattaagcaagtttgacagttcagctaaattccataaggtcatctatcacattacatacagtaattgattttacgttaattggtctttagtttcatggttcatgtttctggttttctggtagtttccagaaactttcgtgttaaatgaagagctatgctatgtaaataaaattcagtaaaacttccctttcattttaattatgtgcttttgaaaactaattttattgggttctttaaaaaactccgtaggagtcaggcatgaattttctactctttagggcatttcaatcatgaaagaaagaaccatctatatttttcatcatctcaaaacaattttagaccactactatttgtaggtacaaataatgttcattgatttgctttatatttattaatcacctaatagttatgaaatggtgccctaagtactgtgactaaaaaataaatattagtaagttaattttactaatttttatccttaggagctttaatttatgctagataatatctgagaaaaagtcaatagtatgatgctgtttaaagaaagaaagcaactgctatcctgtgttgttgtattagcagaattgtcaaggataaaataaataaggtgaagattagactccacttggcaatctttagcccttgattggagtaccatgttccatttgggaaggcacacttattacaacatagacaagtttggcagaggtttcaaaagaaagcaacaaaaaaatgatgaagggccttgaaaatggggcctgtaagaaaaggctgagagacgtgagaatgttcaatcttgaggaaaaaaggcagaggggacacatgataactgtttacagatgcgtaaagaggtgttatggagagaagagggacctatttttctcattagtcaacaaagacacttcaagaagtaatgggtttaaaacacgtggggggaaattcaggttaattattagattaagttaggtaaaatttaaatatttaaaatgttatgattccaagcataattaggctgtggagactaaatcacattagaattggcataggaaagtgagatgaaaacaaattcaatctgaatgcagagggttaattattgcaagtttatatttgcattaaatgttatcatatttcaaaatactttcacatatattgttttactgatctctggacattcttaggaaagagagagtgtatcagctagttttacagctgagaaaatggaatttcagagaggcaaaatgttgcttcgaacccccacactccagattagatagacaaaactgctaagtgcataggattagacaagcaggactaaaagccaactcttcacattttctgtcaatatgtttcacatggtaccttgctatcttttcatttgtaatatgatttctattgtggagaaatattgtttacatagaggaacaagaaacatgattgaacttatatctgcattacctatatctattatttatctctcactactcacaattgtgaaataaactcagcactttggtattatattttgacaaatcattgccaaacgtaatacaatctccagttggtatgatgtggtgagaccctaccttctaccattacctagaggtggagacacatttcatcttttatgaatttcatattcctcatctgtaggaagaaaattataatatcttctggtttcttctagttttacaataaggagtgaatgagaaaatacctgtagaagtacctgaacttgttcaaagaaataaacttgttcaaagcataaactttgcttggggggaaatgtgtgttgtttttggtgtactgtggattttgataatccctttccagttttattttcaatcctaccttttttttttttttcatttcctaatttcagattcctgaggtcaaggccaatgtctttgttgaagcacttaaaatttgctagtctaatgtaggtgttcagtaatagttggtgggtgactgagttaacaaatggatgaataaatactttcagttggatattatgtctgggatatgagcaagaggtgataaatgccatatataatcatcttgttatactcctttatgtaatgatgtatgtttaaagtattttatagaaacatggtatgccagattctcagttagatcctgagaatacaagccactcaaagtctaaaggggttttgcagaccactccaatgctaggtatagacaaaactcttcccagcaaagcaaggtagctgatgccaaaatgttaccaaggaaagacccattggttggttgccaagacccttatggagtctgagaagatgttttagactccctcaaccatgcacacaaattgtgtaaagtaatccaggaggcagcctaaatggaaaggctgttagtatgctgagcttgctaggaaatggaggaattttacggaaaatgtcagcctctgtagactcctgtgatgctcgctagggtgccagccttccccagggagcccacagcacctggcaggcagactgcagcagggagtctcactgggaggatacaaaagagcttaatggccccctgtgcataatgttgaaagaggctgcaatttttgttttcttcggagattaacgtgtgtgtattgcaggttcaaaatggtaagaatcttaattagagttgcaggaagttgcataatatactccatgtcttactttttccgcacaccaaataacagaatctatttgccaaattatgaaggttgatggagaatgaaaactgtaatttgagtaaatgggagccctgcccccattttttccagttagtcacaaagtttaaaatgcaaagaagtaaatctcccaagggagcaattctatttcatctgtggaagaaagacatatgttgttactgatgaaacctctgttgtgaaagcagagccaatgctgggaaaaacttgaaggaaaaactagctgagagccctctgtctcaggagcctgtggcctttgggtccacccagggctgcctgtgcctcttcctgaggcttttcttgaaggcctgctctttcctctgattaccttagggcaattgcctgcctctcttaagagaaaatgtacctgttttgtgccacatcccttcaggcccctgagctggacagtagattgatctgacagatgtcactttgatattaaatcaatagtaccaatatgtttctgggttttcctggccttagcaaggttttatgttcacttacttagagacattctggagaatatctcagaactcaaaacatgagatcaaattggagttctatgggagagaggatattgaattacttggctttattatggctgcactcatagggccagccacgtgtaaaagtttcattctctttttttgaacaaatatttattgaaaacaataaattaccaagaactgtgttaaaatatacagatgtctaagcagacacggcacaatctatggccctaagaagtctaggaggtacaatattttatataaattattcatcttcattcaaagttatttattgagcatctactatgtgccgtgcactgtgcatgcccctggaaagcataagagacaaaattcctttctttgtgggagctgtattctagtgaggttcagcaggtgaacagcaatccgtgttaattatttcttcttccactgaaatgaaaattctatgtttctaaaaaatattataaaagtactcttcaaacctcatattaagaaagtcaaattgtctttagccacatttgataaggattaaagataatcttactattttattttaaacatatttagagcagtccttgtctgaaggaagcttgtgttgaattttttataaagtgagttaattaccttctaattaattttgtgtgtgtgtagtgctcacctaacacaagattttcatgctgaatttgctcccccaaaagaaaaacaattcctatatatgttgtaaagggtcgcaagtcagaactgagatggaggcaatacaaatatataaccagcggcctcagacaagttcccaaaattgggaagaatgaagagatagggaatgactgcagagcctttttcaggaaagcatgagattggaagatgaatgctcaagtaaattagaactcaggaaaagtactgaacagcaggatcatatcatcaaaaatctggctgataggttttgaactcactgaactgaatctatttagaagtacattttgggaagactaaataaacatcaacactatggtctattctaattcaggctcttgctttgtctattttccaggtgataaaacactgattgttattagtgttatcatcaagcatattgagcagtcaatctgtaagttaatagcaatacacagccatatagtcctggaactagaaggaaagaaaatgaattttttcttttttttttttctttttttttctgtagaggggaagaaaaattcaacaccttgagtcagctgcgactcaagggtccattataacttcgagatttttaacagcctgtgcctagggtatgggagatgaattttgttccaaagtggtgacatgggcagatataaacccctgggagcaatttcaggcaagttgagagtccattctaaacaaaaatggacagaatgtggaagatggaattcccacacttgctttctgaccttggctgatattcctcagcagttggtaattagaggaaatactgaagctgagaggatgaaagaataaagaagagtagaataatcagaattgaaagaatgtaaataagtaataagatggggcaaaaacaggaatggtgtcactgacaaaggtggccacactttgcagtaagatgtgagtgggacatagaaactagatttggttgagtaagaggaaaaccatatatacacacacatatatatacacacacacacacacacacacacattaatatatgcatatttaaaaatatatacatttcaaaagctcatttatgttgaatactaagtgggaaattcatcagctgtttggcttcctgtctgttttattctttgccattgcagacttgagttgtcttcctgaaatctttctgggagataactgcatgcccagcccttttctttcatcagaaaaagggtattctgccctgagtcagaagcagggggaaaatagatgataatatctacatgttattgctagaacagagtcaaataaaaattaaaagtccatcaagtgatcaggttgaagtcaataaaaaggtcaataaaaagcaaggatgagccaaaaaagaggacttggtgtactggaaaatgccaggaaaaataaaagacagaaaaaacactgtggcaagatcttctcctgtggcctcagggaagtgcatgataaaattaattgaagcttatcacccatgaaaaagggctacagttggagcaatagctgcacggactacataacagtacaggttctttagcctaagacaaagataacagatttttgttttacttttgcaagcttttttaatatactgagttaaaactctctttttttgcctttattcaactgaatgctgcattttttgagcaatactaagtgttgattggcttacttgaacagcaatttgttaagaggcctgctgtgtaccggccattatcctaaataccagtgtacaaagattagtgatgtgtctatctgctttcaaaactcttataatctgtagcaacatgagattaatttttacatatggtttatatataacaatctaattccaatacaatcatatcattctccatatctcataagaaattgttttgggacattatttaaagaaaactttatacaataaatctataaattgttagtagatttgactcctcctttagatgaaagttttcatcttgtcgtttttttaaattcaaaatatgttattttaagttgatataaaacaatcatattagcaaaatgcatccacattgaaaacttagctggatgggtaaagatcgctctattaaactgtgatgtttaatactgagtgtcaacttgattggatttaaggatacaaagtactgatcctgggtgtgtctgtgagggtgttgccaaaggagattaatatttgagtcagtgggctgagaaagccagaccgacccttaatctgggtgggcacaatcaaatcagctgccggtttggctagaatataagcaggcagaaaaaggtgaaaagagagactggcctagcctcccagcctgcatctttctcctgggctggatgctttctgcccttgaatattggactccaagttcttcagttttgggacttggactggctctccttgctcctcggtctgcaggcggcctgttgggaaccctgtgatcatgagttaataaactcttttacatgatattctcatgatagtgaataaatttcatgagatctgatgggtttatcacgggtttctgcttttgcttcctcctcatttttcacttgctgccaccacgtaagaagtgcctttcacctcccaccatgattctgaggcctccccagccatgtagtactgtaagtccaattaaatctctttttattcccagttttgggtatgtctttatcagcagcgtgaaaacaaactaatacaggcactgttccatctccaaatggtcataatttatcagttcaaaggaacgtactttgcatgccaccaaagggttttctaagaattgggtcagcaattttaagtcaaggttgttggttctgagttgtacctttgagtcagtctttcagcattttagttctcaaatctagttttctactctttccaatggggttattcatccaatagacatgggaaaatcatcctaatcaaaacaaatttatgatcatttctctctggcatgactgcatcaggtagcttaaaccatagaagtttattgtctcacaattctgaaggctagaagttcgagaaaaagatatcagcaggattgatatcttctgaggggctgtgaggaagaatctgttccatggttcacccagcttctggtggtttgctggcaatctttgatgttccttttgcagtgtcaccccattctctgccttcgttgtcacatggcattttctttgcatgcacatctgtctcttcatatggtgtttcttttataaagacaccagtcatactacagtagggcctcaccctaccccattgtgacttcattttaatttattacatctgcaaaatccctatttccaaataaggtcatattctgaggtatgagtgggttggactacagcatatgaattttggggagacataattcaatccattataatcatactgcataactgacgagaaagtaaagaatcaatctgatgcaggaaagataacctaatcaaaaagaggaattaaacaactccaactaattccttacatttaatctatttaatataaaattataattttgcaaacacagcatggtgcactatggtaactaaagcaattggatgatatttcaaaagctttaataactagtatttaatcacagatgctgtgtgtttttacctgaaattcatcctggtaatgcaacataattaattgcacaatttattttagcatgagttttcttatatttatagagatagcatagcaatcttgttttcaaatttccctcagaatgcttgagatcagacattattagcatggagacaatagtttcattgtcaactcctgctggtttgggtacatttacagtaataaccacaatccactagcttgaattattgttcaacattctatgtgacttcatgagggtattaatatgcaagagagttatttgatactaatcaaagatacacatttgtcttcacacttattacaatatggtaaggtaatcacataaaatacttaagatggtagacttcatacatatatatatatatacttttaatgaatatactaaagctaaccgttaatggaagctttgacagaaactcattgttcaatatccaagcaaatcaattttggactataaatgcagaattctaacaagcaaaaattctaatcattcattttatttttctgttattcgtggcttcttatattgttaaggcttaacatattaagatgcacataggatttaatcttcatgagagagcaatgaatacatcattgaatacataccaatcatgtgtaattgttttcatatgtatgtaagcccagcggaaaagagtcgttcattgacagtactcattttcccatttggtgtattttcctaattgtacagtataacagttatagtaaatggttataaatattaccctttagctgtaacatctatgacatttttgttgatcatgataatatgtgattgtttagtcaactgagtttattgtaattgagattggaaatcactataagagtgaaattgaatatatagatagagaaataggataagttaatatggcagctcaacactgaacacagactacaacttcttgaccaccgaaatatgcaaaatattatataatagcttgtatctggacagcgtgctaagctgttcacttgttctttatcatttaatcctcttttcaaatatgtgagatatgttctgagaagataagcaccttgttgagtcatacaggtaatacattttaaaggaggaatttatatacacttaagattgtgtgtgtgtgtgtgtgtgtgtgtatgtgtgtgtgtgagagagagagagagagagagagagagagagagtttcaggctccaagacagatattaatggtagactgcctttgttgcataactgtagcagtggtgtacaactgctactcccatcttctcagtacttcatctctttctttgaatcaactacagctattctgatggctagattatgatctgccagtttgagaatccaactcttgctggccagagacttacagttaaaaaataaatcatttagagtcatatgcttatgtactactgggctgtgatcctcaccctaaagctcactttggcatagctctttacttgccatcgattcttgacagccttatttcagaattcttacagacacagtgtctatttaattttaatacaatcaagcaatggtttctggacatatttggctatttctttgaaaacaatggaatctgtcttatgggcaaaatgacttttttctgccctaaatgctgacactgaattgcgttcaatcatgacagaatttgtgcaatatgaaaagtttgtccactgggtggacaatttctatctagcatttttctctccttcagggatggactttaagttgatttgacaaaattggtttcatatgaacccaaatgcaaaccctatattatctttaaacactggtttctgtgaagttgtttgattaaactaatactgttgactccctgttttctgttttatttctttaagatgacatcccttattctgttctgctacctgggacattgctcttctctccatattaattaattaatattgtttcctaaatctgtcttcctagtctctgtgtttgtcttcaccatgtgtattgggatatattctcgaagggtttcatgtgtgaattccctcttgagtcaaattgtacatgtaatttcccttcattttaaaaataaataagaaatatgagaagaattttcaaaacttttatgttctatatgctttcctctggtttggaaattaatctctgaatttatttatattttaggtattgcaatttgagaattagaagagttgtttttacaaaacacagaaaacagcttttgttttaattatttttcccagtgtgtctaagagtcaaaaagactctgtattagtattcactggcaaacagaacacaatgcagagcagatatcctagaagcaacatgatagatccaatcatccgattcattatagtacaaatattgtaatcaatcataatattcagtgttccataaatccacaattctgtgaaagggataagaaaaaagaaattaagctatcagtgagtttactaaaaaaggaaaagagatttcctgattatcatcattcagaattagtcagacatatacatggtaatcattcatattttaagcaataaaaggaaactcaacacaaagcctggaaagcaacagccttttatttttattttctctaagatgtgaaaaaatagacctaggtgctaatttaattcccttttaagttaatgacataatgggtttgtggagcattaaatagggaataaatatggccttacatttccatgtcggagctaaatgctttctcttccctcagcttctaattcctcagctgagggaagtgatcagcagtcaacgatcacaatgagggagctacgcacacatcctctggtttcctgagctttggaacacttaatgcttagtgcagcttctctattttgagttctaccatgaacccctctctgatgactcccacatatgtcttttttatgtaagcacaccaagttcagctatccctgtaggtagacagcatttgagacttctcagttgggtatgatttgagaagataatggagctgatcctcttgacataaactagcctattggtcctgcccaaactggtgttccctggaacagaggcctaaaaacaaaatatatttaaaatgttcaaatatatttagaaaatattgtgttaaatcaagttagccagatttttgttgctttcattgtcatttttgttaatattgttgcatgatttccagaatattcagtatgcaaataaatattcattatgaatttaacaaaataggtattttctaaacttctttgaccttggaactcttgttctcccttcccaaccccaccattgcacttattttaacattgcactcagcagggctatacgcatcaacattttgggaatttgaggatgaagatatgtttttcctattaaaaatgaattcttatcccactgggaaagaaaacacattaagcttttatcagtctttaacattttaacatggattagccattctgctctttctggattataagcagctgagagcaggctttcattatagggagagggaaagatgatctgaagtgtcatgtgtccccagagaggattttcaagtggaatgccaccatgagagttcctgggctagcagaggacaacttcatatagtgcagggttgcagcaaggccactgacaccagctgtatatagaaagttatgtttgcctcagtttcttcagccaaaacagaggaaatttactagatagtagctatctccctcttagctctaacaatacaatctgattatcttgatggctaagtgtgggaactgagagagttagaagagtgggggtcactagttgaaaaagcaaggttagaaatgaatgttttctcagtcatggctggcctagggctggctctgcaggagttcatgattctcatctccccaaacaacaaagagccatggaaaattcatcagataacagtaattcaacagataacagtataaagactatacatatttttaagatagatttaaaaaatgcatgacatatttctggcctccaatgagtgttcagtatgaaaaaataccaactagatgaataagtataggcaagcaaaagattctaagtataagaaagtgtgaaaagtaaaatttattttatttttctttgaaagagcagtcttcccaggtcaagagattagaaagacaagtaaggtaatgcctcttctctgaagtttagaacagatgaaagtgacacataaaagcagaataagataaatattatatcatagtaaaaggaatgagaggttgtatgtagagtggttgtggacttggactcaagagcatgtggacacaaatttctaggttaaattccctggattcagaacccatttctaccatcttactaggtctgtgtcctcttgtgtaaatggtagtggtgatgataattaccatgcctttctgctagaactattattaggaggattaaagaaaattaatatgtataaagcatctagaagagtgcctcacataaaataacaaacataagtatttactatcattaataataaattatatccaactagaatcattataaggggttttagaaaagaagtagcaataagataataagtgaagaatgagtaaatttttgaagctacaaatggattgaacatagtactctagggagagggacaatcatgaatgaatacatcaagatgaaaagtcaaagggtaaattttagaaatagcaaatagattggtttgctaatataacatactggccctttactgatcatgttgatcattttgtgagaaaacagtaggaaatgacttcagaaagaatatagtttggtaaaaaccattttaactgtaggagaatgaaactggattctcatctctcaccttatacaaatatcaactcaagatggatcaaggacttaaatcaaagatctgaactaaaaattctagaagataacattggaaaaacccttctaggcattggtttaggcaaggatttcatgaccaagagctcagaagcaaatgcagtaaaaacaaagataaatagatggaacttaaccaaactaaagagcttttgcacagcaaaaggaatagccagcagaacaaacagaaaacccacagagtgggataaaatcttcaaaatctatccatctgacaaaggactaatatccagaacctacaacaaagtcaaacaaattagcaagaaaaaaatgaacaatcccatcaaaaagtgggctaaggacataaatagacagatctcaaaagaggatatacagtggccaacagacatattaaaaacatgctcaacatcgctaatgatagagaaatgcaaatcaaaaccacgacacagtaccaccttactcctgcaagaatggccataatcaaaaaaataaaaaaataatagatgttgaagtcgatgaggtgaacagggagcatttcttcaccgctagtgagaatgtaaactagtacaaccactatggaaaacagtgtggagattccttacagaactaaaactaccattagatccaggaatctcactcctgggcatctacccagaggaaaagaagttattatatgaaaaagatacttgcacacacatgtttatagcggcacaaatcacaattgcaaaaatatggaatcaacccaaatgcccttcaatcaatgtgtggaaaaagaaaccactgtatatatatatacgtgatatatattgcatatatatatgtgtgtatatgtatagtatagatatatgtatatatatagtatatatacacatgatatataatgtgtattatatattatatattatatataatatatataaatatatattttatatatataaatatatatgatggaatactactcagccatacaaaggaattagttaatagcattcacagtgacctggatgagattggagattattatcctaagtgaagcaactcaggaatggaaaaccaaacatcatatatgctcactcaaaagtgggagctaagttatgataatgcaaaggcataagaataacacaatggactttggtgactcagggggaaagggtgggaaggcagtgagggataaaagactacaaatagggtacagtttatactgcttgggtgatgggtgcaccaaaatttcacaaatcaccactaaagaacttactcatgtaaccaaacaccacctgtgcccagtaacccgtggaaataaaaaataaaagaaatttttgcccaaaccaatgtcctggagtgtttctccagtgttttcttctagtagtttcatactttctggtcttacatttgagtctttaacctatttaaatttgatttttgtttatggcaagagatagcattctagttttattcttctgcatatgtatatccagttttcccagcatcatttattaatgagactgtattctccctaaggtatgttgttcacacttttgtcaaaactgcattggctgtaaatatgcagatttatttctgggttctttattctgttcttttggtctatgtgtctgtttttatgccagtaccatgttgttttggttactatagctgtgtagtataatttgaagtcaggtaatgtgatgcttccagctttgttattttttgctcaggatgtcttggactgttctaggtctttcgtggttccatatacattttaggattttttttcgatttttataaagaacttcattagtatttcgatagggattgcattgaatctataaattactttgggtagtatggacattttagcagttactgattcttttaatacatgaacatagaaaatgtttttatttttcatatctttttcaatttctttcatcaatgttgtattgtttttattttagagatttttcacttctttagtttattccaggtattttattttatttgtggcgattacaaatgggattactttaattatttctttttcagattgtttgctgttagcatacagaaatgctactgatttgagggaaactcttctacactgttggtgggaatgcaaattagtatagccgctacgaagaacagtgcagaagttccttaaaaaagcaaaaacagaatggccatatgacccagcaatcccactgctgggtatttatccaaaagaaaaacatcagtatatcaaagagatatttacactctcatgtttatttcaacactagtcataatagccaagatatggagtcaaactaagtgtccatcaatggatgaatgaataaagaaaatgtggtacatattcatgatgaaatattcagccattaaaaaagaataaaatccagtcgtttgcagcagcttggatagaactgaaggacattatgttaagtgaaataagctaggcacagaaagacacatattgcatgttctccctcataggtgagaactaaaaaaattgatctcatggagacagagagtataatgatagttatcagagcctggggaaggaaatggggagggggataaagaagtgttcggtaatgggtaatgggaacggaagtacaattagatagaaggaataggatctaatgtttggtaacaaaatagtgtgactataattaacaataatttattgtatatttgaaaataactagaagagtggaattggagtgttcccaacacaaagaaatgatgcttgcttggggtgatgcatatcccaattatcctgatttgatcattatacattgtatgcatttgtcaaaatttcacgtgtggcccataaatatctacaactattaagtaaccatgaaaattaaaaattttacaatttaagaaaagttaacttgacgagaaaaagaatacagtttggaagtcttcgaggatagataggaagagattttccatttaatttggttttaaatgggatcttgtctatgtttgctcagggtaatcatatgaaaggcattataatttgaaagcttaatctcaaaatagtactttttttggtaaccagttgtcttgcagcaaaaacaaaagcactgaacttgggtcaaaatacgtgaattcaaatccatactttataccttcagaatcaaacactctaagcctcattgcgttactctttaaaataaggaaagtgcatctaaattacacattgtttttagtagcaaataagttagatgaaaaagcatcaaatgtaatgttgggcatacataaattttcaatcaacttttaactatataatattatctgaacaagacaagtgaagaatacaattgtaattttttaaattgcaaggcaacagtttctaccctaataatatctacattttcctcataaaagtcagtgcatcagattctatacagtatgctcttcaaattcttggctccaaagttagcaaattaaacatcccatctcatttctagtttgcagtgaaattctcaaaaagtttccagaatccctgatgttactcatcctgagctacatctgacttctaatcagcatcttttacttagaatacagatagcaaatctggttggcagttattttccaatgattcttctgccatactgatgctttataatggctccaaggaaaggccattctacaaataaaagcaaaattaataaaagaatgcgggataattgacagttttgctacaacagcatttaatttgaatcctttgaaacttactcttcactcattgatttttaggctcacaaattctttgtgtgaattctctcttttacttttgcattgtgaaatgatttatcatttgggtaattttccagaattacactttattattttgtaaatggcatgcagcacagatggatattagcaaggtctctgtataaacgccagcaatagaggtggtaacattgccctgagagttttctcctgaaacaaatcaaataaagaagagaaagcattgccaaagctggccatgacagaggaagtggatccaataatagacatctcgatggatacatatatatgattcaatattgtgtgacctttactttcaaactcactttcagaaaatatattctaaaggggtgccaaggatattgctgtctactctctactgacttccatgaaaggaaacaccattcctctgtatctcagtcatcaatgagtacatttatgaaagagtttggccattgtcaattctaatgccgttaagaagaacttgagcatagcttacatttttttcctcattttactcctacttgtatattgctttggcatatactattagtgcaatgctgtgacttccaaaacttctcagaaagtaacaacttggactgttaagagactccagcatttgaaatatattttaatgcaaactgtctccctgaagacctctatccatagctaagatagttgtatccgaaagctttgcgcttacttctttgcagtgctatttgtaaacattggcatagtaagagtgataaatttctatggaatcatctttatcaaacatacattatagaagtagaacttattccagctaaccacattatcatgaatagcattttccatatttctttgaaacaatacaatagaaacaatattatcttaaacattaagtatccccattgattggtccagtgaaatactgcttggaatgaaggcttcaactttaaatctatttaatcaaatttggtaaaacaatcatggatcaaatatattattaatgttacgtggcttttattattattattattattgcaaaaattaggagccttggtttttgtggccttattctatttcagttagatataatatctcctggccttgggtgctttttacatacaaatggggtaaaatagttattataaagaatagagattgaatagatgtgcttagagtaatgtctgacacaaagcaagcactcggcccagcacagtggctcatgcctgtaatcccagcactttgggaggccaaggcaggcagatcacgaggtcaggagttcaagaccagcctggccagcatggtgaaatgctgtctctactaaaaatacaaaaaattagccaggcatagtgccatgcacctgtaatcccagttacccgggaggctgatacaggaaaattgcttgaacttgggaggtggaggtagcactgagctgagatcccgccattgcactccaacctgggtgacagagcaagacctcatctcaaaaaaaacaaaaacaaaacaacaacaacaaaaaaagcaacggctgttaattgccaggaagaagagctcctacaattgtttcatgtgcatttaggcactctcttccatgtgagaccccaagcagtcagcaggactatcaaaggaacccttttaagacttagatatctatttttaattcttgcactgcatttctactttgataaggggaaaaggcattaaaacacatttttgaaatgtaaatttccaaagttacaaaaattaacccaacacatcatatgctctttgaatcacttaaattggcagctgtcttataatgataaaagacctacggcgttcttagatgatgtctacatgatgccagacagctaattgaattaaggaattaaggaagatatcaactagtccttccccttatttgccagatgaagaaatggaggccaagaaatgtgtagtgatttatttacatcaggggttgagtctgttggtcgtgagaacttctagcctagttattttttccaccccatctatctgtcctgaaatttggtttcttattgctgcagcattgaagagatggaaccactaaaaaaatactgataaaaagatgtttatccagaggcaactttaatggcaactcaaactatttgaaatatgatggaaaatttgttactgagtgaaaaggccatcgcacaatcaaaattgatgtttaaagctcgcctactaactcttccacactatccaatgtagtggtcctccttcattttgctctttagagtttccctaattttctttatgcatgcatctgatttcatcttactttagagaaaatactaacagtgtatgtctagaacatggcagattggagccttatagcacgagaggcagggaaaagacagctaatagcgattcactgataggagaagaaggggtcccatattgtttgagttttagataacgtttaatgatcttcctggataacagattctatgaggattttttttttttgcttgtttaaataaaagctgattcaatgataacaaaaggagagacagtaacttcagaaaaatatagatatgctaattcttacatttgtagagcccttttgatattaaggttcaagatctaaaaatgtaattctcattcaagaccgtataaaaattgttagttctatataagcatattgaatcactgatagattaaagcacattcatcatactctagaaaacaaggaaatgtgtaatatatttgatgtcatttttattacaattgttaaaatagtgaagaataaacctgttaactagaaatctatgcatgcagaatgtcttattacctaaataacaccagataaatgaggtgttactgtccacagtctcacaacagagacatgaaaaacccttctttacactggtaacccttaattaaactgaatttttggtgtgtcccttcaggagaaggtcaccatatcagcaataattaggggaaatggcattgtgaacattactggatgagatgtggtgtatttcttactttcaattattgcctccttgtttgaatcattagcatttggcagatttgttgctgaatttgttgttctgatttaaaactcggtgtaaggttgaatatgttcttatcttgatcttatatttctgccatgacttgcatttcttgctgagtttctgacttgaattgctctatgtttttgctgagcttttgctttgtcttgttgtatttctatctggaggggtttccctccgcctttttctttttgttatatctcttctttggcctattgtatttctctggcccattcattagctttttttttcctttaaagttattctcttgttcagtatatgcagtacctaatcaatacgcttccttgcttgctgcaggatttccaacttactgtgttttctgtcagctttgatactgcctgagaggggtttctgtgctttggctaatatattgttgtctgaattcgcagtgttttcagctcattacactgactttaattttgatgtatttgtattttatccagttcaagtcatgtttctttcctctgtcaatttaattactttctgcctgggcaacattgtgtttatacaattgctgctaaagcgacaaaaggtttctatttaaattaccacccagagcatcagcaattcagcctaaaaaatatgcagaactcctctgattgatgtcttacctttctgtggataaggaaatctagtctattgagaggatcttctttatagaacatagtcaagcctggtttatagctgtagagtcattaacagaggagatgagtgtagggctatggggtcactgtatgacttctctgtaagaaaaaaatgtatgactaggttctattcagtacaagtcatgtcctaacagcaggaaaaagaaaactttcttaggtgtttaacttatatttaggtgggctacccaagctccagctcttatttttctatgtgttatatatattatacacatttctgggtttgaatcttgttctttctaataattttgcattgggctgtgtaagtcaggaacattgaatttccattgtgtacataaaactatagcaactggtctaaaaacaaataatgtgggaaacatagtaactgttcctgttttcaaaggcttacaataatgcgaaaaaaagggaaaagcttatgagcaatacatctttgaaaacagaaacagtgaaaacactccagtaaatacataattggttattaatagaattttaaattggagaggcataacaattgcaacagctcttggaaatgcttaggaaactgaggcttataggtttacccgaacatatgtcatagataacattaatcaactagctgatgaacatgaccagcaaatgcattgattgcctgatcagcaaatgcttcaactgttttgttttacaagacttaatatgtttaaacaacaacttactctttacctactttttaaaaatatccttctgtattttctgcaacaaaccattgttgagtccctgtgcttaacaaaactgtgcaactgtgctatttacccagaggaagaagaaagatttttttaagtcagttcttttctggtaagtgtaacttttctagtattggataatctttctgagcctcagttttcttatctgtataattggcataaatgaaccatgagaaacaaataaaatgacatattcagctcagtgtgtgtcacatggtgagagacccattaagtttgctcttttccttttgcctttctcttttcagtgttcagtcattatactgtcaaataaattggagtttctggcttttctcacactcaagattattatgatatactacactagtacatctgaccttgataaaaagcaattttctatagtttaattgtatagcaataggatgggaaagtctctgattctcactctgtagcttcttcttcccagggctggagtcatttaatctctacctttaggctcattctaccctggtcccttgggtcatgaattcatctggaagattcagacttatgctttaaggctctcagaaactcaatcttgcagaagaatctggcctccattttgtacacactttgttcaaagagcctcctagcaccttcccaagacccacatataccactcccattttctctcttggttctggtgattgactctctttatgttcttggaaagctgcctagtatcctaaaaccagtattgctgcctggctgttaccaggctgcaccctcgactaaagttgatcccctgcactcatctttggactctagatttctattacatgcacatcccttgtgccaaattatgctggcttgtctggccttccaagtttcacctattgttatgcttatttgtcagttcaagtctctattccagctctatcccacttccttctttctttagcctgtgtccctctcttggatccctgaaacattttgagtactagctactcctatgtcctgcccatgtgattaagaatgatacttttctcccgtgcttgcagctgggtagtcatactccatacccacccaggtaaaaatgtctggatccaaatctacctttcataacagatctgatgtgctattctagacagctttactccatgatatattgcagactttatgtaggttaacaaagcattatggtgtcattcttgtgacagccctacattttcattatgatttttgtgtttgcggtcctttttgtgacaatttcttttagatgaaaatgcttttaatgaagcccttttggtacttgggagcctcactggaatggatttagtacaaacttgccttatttcaaatttatgttcaatattgaacaacactgttacccatatttaggacagtagacaggtaaaggttgcagaatttttatgaaatataaagcaatatccactgttataatgaagcactacataaaattgtataatacgtgagtttcttattcctcaaatagtctaactgattgttcattgggctcactcagccaaaagtagagggaaactttgtacagacatcattagtttttctccatttagagattaatcatgaagagctctggctctttaattctgtaatttgtatatttaatgggctgctgcagaatctatgacagtaattagcatagcctgaaaactcattaatacgcaacaacatgattaatgcagcattaatgcaaacatgactgaagttatttgggttatgtagtaagaagattaaagctaaaatgtcctgtttgttttaccagtggtgagtataatagagtggcaaaaaaataaaataaaaacaggtatcaaattagctgtttaaaaaaaagaaaaaaaccagcaaaatttaaatcaaggtgattttatttttcccttaggtctaaaatttgggatataagttatgttctttacttttatatttattcatttattcataaatttatcattactgaaggaaagttcattcaaccttttagtttaacatagttaaccttttagcagctttaacataatattattagtcttacattggaaacaattttaaattgtactaatctttgaccaatacattacacatttctgttttgaaactaatatatattattggctatgccaaataattaaaggatttgttcctacttattcagaagttacatattatgccctcttctcactgtgttcacctcttaaataaatgttcaaatactttataaaatactaccataaaactcatttttttaaacaaaactatcaaatatgacatgttaaatactgaaataatcaataatgtttggggatgtaaaagtatataagttttgcttgttcttgctgtctcatgtaatcatattgaagtcctctcattcttacttttttttggcttttcttttttgagacggagtctcactgtgtcgcccagactgcagtgcagtggcgccatctcggctcactgcaatctccacctcccgggttcaagcgattctcctgctcagcttcctgagtagttgggactacaggtgcccgccaccatgcccggctaatttttgtatttttagtggagacgaggccgggtgcggtggctcgcccttgtggtcctagcactttgggaggccgaggcgggtggatcatgaggtcaggagttcgagaccagcctggccaagatggtgaaaccccgtctctgctaacaatgcaagagattagctgggcgctgtggcgggagcctgtagtcccagctactcgggaggctgaggcaggagaatggcgtgaacccgggaggcggagcttgcagtgagctgagatcgcgccattgcactccagcctgggtgacagagcgagactccatcgctaaataaataaataaatacataaataatacagacggggtttcaccgtgttggccaggctggcctcaatctcctgacctcagatgatccatccaccttggcctcccaaagtgatgggattacaggcgtgagccacagtgcccagccattttttttttttttttttttttttttttttttgctatttagtatgacctgttttaatagcggtcctaaactttaaatgacttatttttcaatcttatagtcaaatgtcaagagtcattaatagtatctcaaacaaaacttgcattttaaggttaagcaatcctggatgactgaaaaaaatatgtatctgcttttttgtacttattttattctaaatccacattagaaaaatgtttatgattttattctttttcaataaaaaaaaacaagtgaatatccacgaagtacctgactcttggctaggtgttgaggaggaaaagcaaacccatcaatgtctgtgcacttggaaataaccatctgggagaagagaagctcctttcaacctagggatgtctatagataagaatgaaattgcaccatagaaagaaagcatatcaacattgcctgctaccaacagatggcactgttaatggtttgtatcacaactgtatttgtgggaccaatagatttgctaacattctcagaaggtagtctggaaggagaagagcctctgttaaggcagtgaaatgatatacatgctcaattttgtttaattatcttgtcaaaattcctggaaaaaaataaaaaaatatatttatatgggatatttcgtttaattaaaatacatcatcttttaccaaaattaatatatgtgaaattaaattgtagtagaactttaaaacaacatagagttcctattgctttgaataattggtctttacatttagtattatattatatgttatattgttatgtataccatatatataatgttatattatatactgtaatattagagtagcaactgatactcacaaagctaaacaactcagttccactgaaatataccagattttgacttagttttaaaagggaggacctagaaacagagagaaaatgcatcagtgggtaaaatcatttacctctaatgttttatttcacctctatggtttttagtgtactagagagctgtttaatcagaccattaccaaattgaataaatggctacttagtgattactgaactatttagtgatggggttggggagaactccttttttaaaaataagccttttgaatagttcatataagaccatcctaataaataaaatggaacagaatgtgtttgccatgtaatagcttagtgatttttaatttctgtattgtgatgaaacaaccagcttttctagaatgtagccagtcctttgtttctcagaagctgtgcacacttgcggcattcagtcctagtgctgccataacagagtttctaaacactagttcagaaatgagacatttttgtttagtctctgtttgggcacagccaagagtttaagactgtacatggagagaaacttgcttttttctgtggatgtaatccaggggacctgttgaggtctttaatgggtggctgacaggatgaactgggcattcaatattaaagggtggtatcatagcaagggggttaccccagcagagtttgtagatcaggaattgtttagagcctagatcttgggaaagtgaacaagaagcatgttaactaaagataaaaaacagaaaccaggtattgtctttttaaactctgagctcttggagtggcgatcatgtcttttccatattagtatctccagtgatgagcattgtctgttggagacactcaatatacatttcttgaatagagtaaggatttactggactttgacacagaactaaggttctgtgtgatagaggtctgtgtgcttatgagaagctggactgtgtaggtgaggatgctaaggctcctgttcccatagagaagtccttgagatggctcaagctgctggttcccttttttcttggactttgcaggtattcaaggtgtctctagttagaagctttatgttttgtaatgggtaaaaatagtgctaaaatatatagctctttgctatttataccaaattgagggtctctcagaacaaatacagtggacggattttaataataatagctaatacttatatagggccaaatagttctgagtacttttcatgtatttaactcatttaatcctcccaaaagacttgtgaaagaagaaactctcgttgcccacttctagaggaggatattaggtgtagaaaagttaaacgatttgtccaaagttacatataaattaagtgcagaagctagtttttgaaagcttggctctagcatttgttttttaatcattaagccaaacatcaaattccccttcccacactttttttttcacttttaccaaagaaatatcttaacaaaatgactcctttggaggaggaatacatgcatatatatatctgtgtatacatgcatatatatatctatatatgtgtatacatgcatatatatatctgtgtgtgtatatatatatctgtgtatatatatatacatatatatatgtgtgtctgtgtgtgtatgtgtgtctgtgtttctgtgtgtatatgaggtcagagtgagggccaagaagctattttttctctaaagtggttcatatattgcaagtgatttaattgagggaagatatagttgtattagctaaaacacttaaaagtttataaataggtgtgtctacacaaaggcaaacattcctctaatttctaaacagtttttacttctattgaattgaatatgcctaatattttagtgtcctgatgattaaagtatgaggaatgaattaataaccaggttcaaatatgtgtattgttaccatgcagatctgttaatacttattaattcccacatcagtgtgaactaaggaaaatgaaattaagttgcattaagaatgtgctcagttatatataaagatttacttcctgtaagagtgattatataattatatggtttactaaaatagttatgagattttattctttcattcatttgacatgcattattggaatcttagtattttcaaactacgtatttggagataaatattgcagtctgaccataatgatagtttaggtattccttggcctggaaggaggacactagttcattttattaacatgttctttgtctgtggagagcctccacaatgccattttagtaaaatactggatctttactaaaccatggctaccaaagacaaagtgtcattctaggcagccaacagacttcttgccctactcctgacaagcaaaataaaatagcctggggtaagagaggtaatggccatgagttaagtcattttcatagttatgctaaatcagcttccctcaggagcacccccttcctttcctttctctgtttaaatgaggtggagtatgatgtgactattccagcacactcaaaattagatgtgtgatcaagtattgatcttcaggaagttcctaatcctgtctgatgttttctgtgttagctttttttttccttctgtcataatgttagattagccagcaccttcattttgttattcccttactttttaaggcaggattcttctgtacaagaaccctgaagcgaccctaatattgtatccaaaatgtagggtcagaatcaggagtggagactgtgagttcattgtgagttaacagtctattatttaaaagtgcaacaagaaaaatagttttgctttcattccatttctgggactctaattttttccaagggagtctggcataaagtatcgtattggtccaattgcttgggatccactgagattgttactagagagggctttggtgtaaaaccccagagtaaaattctttaatgtccttttgggtcattgaacactttctaccattatgcttgacatggacaccattgaaatcattccaaggtcaaggtcactcagcaattttactaatgcttcaagttagtggaattttatttttccccccataatgcttgttttacaaaataaaatacagtatattttagtagatattgtaagatcaatttttgaaatttcttttatcaaaataaatataaattttatgaagtatctgtatgtttattatatgtaaacgtgcaattacaaatatgaaatataatttatatacatgtatctatgcatgcacctggatcttatttgaggtataaaacatgaaactagaactaatgtgttttacaaatatacgtaaaaagttattatttttttaattttatagaaacacagagtaagtaatgataaaaattcatttgtattaaaaatatttttataactacaattagtactaacattttgctttagcctaagcttaaatgctttatttgctagagtcacttgttaaaatactaaaaattttacaaggtatgaaggtaaaatagaaattatttcaaaaaaacaaaaatgcatgctgaattttctcttttcctttataaaacaagcaagtcctttatgtagatttctacaattcataattcaatgtcattaaatggcattcaatttatattttagactattatgatttcaatttgagacacaattgttttccaaatgaattcaatgtggggtatatttatgtaatagatgaaatgtatttcatctattttggaattgaataaattcaatttattcaattgtttggaattgaataaatacagtacgtataaagggaggatgaaaatgtacaactattggatgttgatagaagcattctgaataagaagcatttttacaataaactcaagtatatttttataatgtactttttaataatacactgattttaaaagtcttttttataatgtactttcatatattttttcttgagaaatcttgatcttgtattgacaattgcataaatatatttgtgcccagcacaatggcttacgcctgtaatcctagcactttgggaagctgaagagggagaattgcttagtccaggagttctagaccagcctgggcactgtggtgagaccctgtttctacaaaaaagtcttttaaaaattagctgggtgtgatggcacatgcttgtagtcccagctactcaggaggctgaggtgggagaattgctgaggattgtttgagttcaggaggtcaatgatgcagtgagctatgatcacgccactacactcaagccttacaacagagaaagaccttgtctcaaacaaaacaaaacaaaacaaaacaaaacaaaacaaaaataaataaatatcttggtatgtaagggcaatttggggttgataatttggagagggatggaaagatacatagatgcctatatctacatagatagagctctctctatacatacggatacagatataaatagatatctatatgcagatagatatatatctatgaaaatacacatctaaataaccatagatatctattaatatctatgtatctgtatctatctatacattttaacttaaaactttatatacacataagcctatagttctatatttgtagctaagtttaaaaagctattcaagggaagccctgagttgttcttttatggcatctggtggcatttcatatttgacgtgttggttgctattggtgtttgcactggtgaatccttccactggaaatttcatttcttcagggtttaccaatcacctaaaatgttttctttctggataatatcccctgactgctttcttcctcttttagcctaaagtttcctaaaaatttaaaatgcattgtagtcagctttacttacctttcacagaatagcaactcaagaagtgtatgctaagaggaggaataaaattatgtaaaaaatgaactagaaacatagttacctaagacaaaaataataagtggacaaaccaagagtaaacattttacttaagggtttaaaaatgatatcaatttttactagttagggacaatgaataatgcttatcacctccactgttatttagtgttgttctggatgatataacccatgtgtaatgacagaaaaaagaattatggctgttgaaaaggaatagatgaaatttccagaaaataagtttatacctaaaaaagccatcaaaacctattataaataacagaagtacaataagatggttagctataaataaatacataaaaataaatattttttccataattcagcaataacaaatctgaaaatgatctgattcttaatatcaattaaatatataataagtactatagcttaacaagaaatgtgcaggatctatttaaggaaaagagaaaagaagaacttataataatcattttaatacaaaagagtgaattagttgataggtagctaaaagcagaattttaaaaatttactaaaaaaagcaattttgtaagtaaatttgtaagtaagaaagaaaactggaatatatccctatctcactttacatgtcaaaataaattacaaattttatatttaatactttattttttccagaaaattaaatataaaaatacagaaaatgaacagaaaaaatataagtaagttacaaattctgggctaggaagcccaattataaaaagcaaaggaagacgccattattgaaaacatttagattttaaaacaaaaataaaccccctttttacatttaaaaataacatttaaaagtcaattgttaaaaaaaagtaaatgactttaacaagtgacagacaaagaaaccatacccttaatgtggaaaaaacgcttacagatcaataataaggatgcacaaatgacaaaaaagtatccaaatgaagaactacgatgaaagttcaaaatcactattcatcttgtaaatacaaattaaaactagaataagatttcattttaaatctatcgaatactagttggcgtctttcagaaatgccaggccaaactattcctgatgctagaaatgttttgcctgacagtggctgaaaactatttataacatatggaaaggaaattacacaacttgagaaatttcttgcagtgaactcagaaatgaaaaggcggttagatgacaatttcagttcattaatttataaattcacatgctaccacagattttagagatcatgcaattcagtatctccatttaagagtaggaatctatgggctattctgctcaggaaatcagcactatagcatgtatatgtatttcataaagtatctggtggatattactttcttgttttgtttttttttttttttttttatcatttggaggttgtaaagcatgatcagtccttataagggtcacatttagacagctacagattttaatcgttccaaggaaggaatgggggattatttcaaaagacgaaagaaaacattctttgatctaaaagcagaaccaccatttgacccagcaatcccattactgggtatatacccagaagaatataaatcattctaccctaaggacacatgctcgcgggtgttcattgcagcactatttacaatagcaaagacatagaatcaacctaaatgcccatcaatgacagactagataaagaaaatgtggtacatatacagcatgagataccatgcaaacatgaaaaaaaacaagatcatgtcttttgcaggaacatagagctggaggccattaccgttagcaaactaatgcaggaacagaaatctaaatactgcacattctcacttataagtgggagttaaataatgagaactcatgaacacaaaggaacaacagacactggggtctatctgagggtgaagggaggcagaagggagaggagcagaaaagataattattgggtattaggcttaattcttgtataatgaaatcatctgttcattgaacccccgtgacacaaattcatgtatgtaacaaaccttcacatgtaccccacaacctaaaataaaagtttttataaaacacatttctttgttttatacagaccagaatgaaatcatttctcaacacttcttttacattaaagcacattattcttgtttttttcctcaggtattgccctactttttaatcctaatctatagttccattgtaatttttagaatgctaatctaatatttattgaattcttttgtagtaagcaactgaaaaaaatttaattttcaaaaggaagaaaaaatacatgtttaaataataagataacacaactttggtattctaaggaatgtttggggattcattccagggcgctcatattttcaggttagctttcaactgttattttgtcgagtataatcaatggagattttgttattcatgtatttatagagctggttagccataaatagtttatgaatggagacatttctagcaccacctaatggcagtcaagtaaaaagaaaaagtttttctaatttaggaactgttttgcataatttaaattaaactatatagccagagttacttccatatgaaaatgaacttttacattccctaatgcactaactaggcatggaaatccatctctgagcaattggattgagtaggaatgaagctgaagggatatttgataatgaaaccaaggggtttctgctgtctttatgtgtgcaagaataagaaaatacctagctaatagaataaattaattttatgtgaaaattttctttttagtttcagaagcctatgcatactagattttccatactgtagtttcctgaaaaaagtatattttgagtattgtattggcatattttatttgtcttgtttttcagcagttatttatacatctttgaccaatttattctactagtttaataaagcgttttttaaagtttctgatagtttttttaaactgagtcatatcattctgattataatattggaattttctgttgaatatgagtcaaagaacatgctttagatccgtaagctctactcatttatttcatgtgtttcctagcaggatttgaagaatgtgttgtctgtcataaccctaggattgagatcaatggatttggttaatgtatccgaaggagaaggagaacttagcgatagcagcagattctgacacctttcatcctcgtctcaacactttggtttgatactttcttctatgatataaacagggaatactaggcagactgcagatacaggtagttttttgtttgtttatttgtttgtttgtttttgagatggagtctcactcagtcacccaggctagagtgcagtggcacgatctcggctcactgcaacctccaacctccgcctccaggattcaagtgtttaccttgccgcaacctcctgagtagctgggattacaagtgtgccaacgagcccaactaatttttgtatttttggtagagatggggtttcaccatgttggctaggctagtctcaaactcctgacctaaagtgatccgcttgccttgacctcccaaagtgctgggattacaggcgtgagccaccatgcccggccagatacaggtagttataaaaatcaacaagaaagagacagtctggtggtggtagtagtttcaagaaagtgctttctcttcgactgcaatttcttcctttctatgaacatttatttattgatgccctgtaatgcccttcacttctttgtgcacacactgaattttaattcagtcttcacagtcctgcttaaccatcacagcttctgtgaactttttctgtatatcattttgctctcatttcaacaaaattaatcacttttgctattttatagctgtagattacatatccctcttgtactgggtctttataatattttgtactcatttggatacaaatacttctactgctataggatgggtttcccttaaagtaagtattatgcctttcttgtttatctttattattcagagcaaacatgtattttggtgaaagcaaaggcaagttaatggaactgatgtatctttaagttattgtctactgtttattttctctagttttatgttttaatgtaggctgatgttttcatttcttcctttcattaatccatttctttattactgctaaaagttaactagtatttgttgttagttttttgttttcttttgttttagagacagggtctcactatgtcactatcttgcccaggctgtactcaaactccttggttcaagccatcctcctgccttggactcccaaatagctgagactataggcatatgacactgtgcctggctgggtttttgttttgttttgttttgttttgtttttgttatttttaacatcatatgatacttgattgacttttctaaacccgtggattaatatctgcttctaaagtaaaaaattgttaaccttgttattgaaagctagaaagagaaaatgtctggcttaaaggctatcctaaatttttgaaaaattcttatgagaatataatcatctatataaagggtacatttggaaaatacaggtatatctttaagaaagattcagaatttacaagaaaaaatattgaatatgaagatgattagacaattgaacaaatatgtagataaatacatcaatttttacaaaacatgaaatagcattaaaaagagaagaatttatcactgctatcacttatcactgttgcagaggtccgattaatgcagtaagaaataggagtttaaaagttggacataaattgatcagataattattattttctgataatatttcctgtaaaatccaagataatccactgaaaatatagaaccagttgaacaatctacaaattgactggagtcaagagaaatatatataaaacagttgcattcctgttctcacaaaattactcataaaataattagaaacttctgtttcaaattgggatgtagaacagtaagaaagaacttcgctttcatggtaacaacaagaaaaccagactaaagaaatatctttttctatgagtctgtcaaggagcaagcaatgcagaaaaccctggctgaattgaattttaggaagaaataagtgcttcataggtgatcagagtgctgtggcagcttccatatctgaggctaaacacttgttcagacagcggaggagtatgctattgtagatggggagaatttttaaggtcaaggggaaaccatccacccttagacaacaatgtagcctagtaagatgaaattagatctaaaagtctaaatgccaaagcaagtagctcagccccaggttacactattatcctccacacttgaattttgctaagataaagtcagttgaagaggccctagaagtggattcctatgaaattttgccatgattggattccagaattatgaataaatttaatccaaatatgagccaaaaatatttatagtcccagccaagtcccccgctagctcaaatgaggataagatccaaaaggtggcatcaccaatggttgaaggttgagctaaacacaagtgaactaaatacaattaaagcccaacttcagttctacataagtcagtagaaatgtatccacagattgccaaattactgtaattagaaagcaaagaatttaaagcaaatattgtaaacatttaaaaaaaattaaaggtaaaattcatataatggatgaaaagataaaatattttaagagataaatgatagctctaagaagaaataaaatggaaattctagatctgaaaagtataaatttacaataaaaactttattggataagtataatagcaaattggtcagtgcagaataaaagattaatgaatttaaacacatatcattatgaagtaaccaaagaaaaatgaagagaaaaataggttaaaaaataaacagatcgataacatgtggaataatatcaggagatttaacatacatggagatgtgggttccaggaagaagaaataggcagaaaaatatttgaagaaataactgttgctaaatattcaaatttgatgatgaaacaacctaaaaatgcaagaagctcaatgaattccaagtagaataagtataatatagccacatattgtatactcacagtccgattactaaaaaaaaaagattatggaaataaaaaccttaaaatcagctagagaaaaggaaaaaggcactacatagaagaaaacaatgaaatgaatgaaggctaacatttcatcaaaaataattgaggctagaagataatacaatatctttagaaactttaaaacaccaatctcaattctatattcagtgaacgtattattcaaaaataatttgaaagacatttttagattaaagaaagagttagtatatcatgaatagtcttgcattacaagaagtgctaaaaaaagttttaggctaaaaataccaataataactcaagtgtgaggaaaaaatgaaggaaaatggaaattaaaaatgtgaataaacagaaaatattattaaaaactcttttgaagacatttgattagtgaaaacaagaaattttaaacatattctgcagtttacaacatatataaaattaaactgtataaaaaatagtacaaataattggacaatggtaaatggaagtatgttgctgtaaggatcttatatgtgaagtagtataatgttaatttgtgatagtatgtgtgttaagaatgcatatgatgatccttagagagccattttaaaaagtctaaagtctacctagggagatgaaaaaggtagcaaaatggaatgttaaggtaactcctctaatccataacaaggtagggaaggcacagcaaagaagcaaacagcaaatgcaaaaaaaaaaaagaagaagaaagtaagaaaagagagaattcaaatagcaagatggtaaaattaagttaaaaacatattaataattatgttgaatataaatgcacataacacaacaatcaaaaagaatagattattaaactggctaaataagcaagacttacaaagggtgtacaagaaacacacttcaagtataaaaacataaaaagcttaaaagtaaaaggatggaaaaaataaaccatgaaacatttatcataagaaaatggtagtggcaatatttatatcagccaaaattacctttaagaccagtaatattactaaacagacattttataatgatagtcaattgattaagaagaaattatcctaaatgtgcttatatgtagtaatagagtttcaaaatacataaagcagaagtttacaaaccaaaggacaaaatagacaaattcccttctatatttcaagatttttaaatgactttcttagtacttaataaaagaagttgataaaaatctataaaaatacagaaaaatcaaacacactatcaacaaacttcagtgacagttattgtacattctatacaaaactggaaaatagctattgtttttcaaatgtacatggaaagtatgtatatttgaaagtatgtacactacaaacattctacagctaatatgctgggccataaaagaatcttaatatatttaaaaagttgaagtcagaatatattctctgtttatatagaattaaattagaaatcagtctgaaaatgctatctggaaattttctaaatacttcaaattaaacaacacatttctaaatgccctaccaattaaggggaattttttaacaaaaaataaagtataacatgaactttttggaatgcaccccaagtaaggcctggagagaaatgtataggttaaatggttatcttagaagaaaaaagtccaagctttcctaagcttcttcttaaaacaggcaaaaaagaacaaattaagaccaaagtaataagaaatgaaaaaaattaaggcagaattggatatcaatgaaatggaaacagaaagcaaagcccagaattgatttgcaagaattatgggtgttggggaatggagagtggtaaggggagagaaggaggggggagagagaaaaggagaggaagagagagaaaaaaatattttggattaattttaaaaatctatcgatatgatttaccacattaatagaggaaatagtatagcaaaatatcatattatctcaatacagctgaaagacatttcacaaaattttatacctattcataatgaaaactttcagcaaactaagaataggagagatgaaggaccactacaaatattctacagaatacatatacatatatatatatatagtatacatatatgaaatgtacactacaaatattctacagctaatatgctgggccgtaaaacaggcaaaatatatatacaatatatatttaatatatatttattatatatacttatacatacttaatatacttatatatttatatatataaatatataaaagtgaaatagtgcatgttttgattttaagatagggatcaagttttcgttcaaactttaccagtagttctagccactgctaaaacaatacgataatataaaagtcataaatatagaaaaggaaaagaaaatgtatttgtcatcgacataattttgtatgtaaatgctttaaaaaatctttgaaaaagtgttaaaactaataaatgaacttggaaagattgcagaatacaatgttaatataaacaaaattaattgaacatactagcaataaacaatttaaacaaagttggatttaaaagaatattcaaaacatagcacttaaatttaacaaaataaatgaaaatatttgtatagccaaagctataaaacataacttagaaaaatcaatgtaaacctaaatagatgaagatttatcatgtttgtggatgaaaaacaaaatattgttaaaatagccattttcctgaagtcaatttattcatttaatgtaattccaatcaaaattccagcaagcttttttgaagaaattcccaagttgattctacaagttgaaagacctagaatatccaaaatactattgaataaagtattaaaaaaatggcaaactgagccatcttatttcaagatttaaaataaagccataataattaagacttcatagtatttgtactggcaaattaatcagaaatagactcagacttccaatgtcaattaaaatttgatagaggtaaggcagttcaatggggcgagtacaatcttttcaacaaatagtactgtatagtgtataggagtcaaaaaaaaacaataaagcttgacccctatctcacatcatgcatacaatttaatttgagatgggttcatagacctaataaataaaagctgaaattataaagcttctagaagataaatgagaaaatatcttgatcatcttggtgttggtaaagatttctcagacaaggtacaaacaaagcgctaaccattaaaaaatggtaaattcaacttcatctaaaatattaagaaaatgattgccattctaactgatgtgagatggtatctcattatggttttgatttgcatttctctgatggccagtgatgaagagcattttttcatgtgtctgttggctgcataaatgtcttcttttgagaagtatgtgttcatatccttcgcccactttttgatggggttgtttgtttctttcttgtaaatttgtttgattctggatattagccctttgtcagatgagtagattgcaaaaaatttctcccattctgtaggttgcctgttcactctgatggtagtttcttttgctgtgcagaagctctttagtttaattagatcccatttgtcaattttggcttttgttgccattgctttttgtgttttagacatgaagtccttgcccatgcctatgtcctgaatggtattgcctaggttttcttctagggtttttatgcttttaggtctaacatttaagtctttaatccatcttgaattaatttttgtataaggtgtaaggaagggatccagtttcagctttctacatatggctagccagttttcccagcaccatttatttaatagtgaatcctttccccatttcttattttcgtcaggtttgtcaaagatcagatggttgtacatatgtggcattatttctgaaggctctgttctgttccattggtctatgtccaacaatgacagactggattaagaaaatgtggtgcatatacaccatgaaatactatgcagccataaaaaatgatgagttcatgtcctttgtagggacatggatgaagctggaaaccatcattctcagcaaactatcgcaaggacaaaaaaccaaacaccgcatgttctcactcataggtgggaattgaacaatgagaacacatggacacaggaaggggaacatcacacaccagggcctgttgtggggtggggggaggagggagggaaagcatttggagatatacctaatgtaaatgatgagttaatgggtgcagcacaccaacatgacacatatatgcatatgtaacaaacctgcacgttgtgcacatgtaccctaaaacttaaagtataaaaaaaaagaatcaaaactttaaattaaaaaaaaaatgaaaaggtaagtcaaagactggattcggctaggtatatgtttaacttagagaatgccaagcagttttccaaaatgattgtttaattttgcctttacattagcatgtatgagagtttccattgcatcacctattcagcagattttggtgtttttaatttgaccaattctagtgagtatggagatgtgtctcattgtagttttaatttgcagttcctggatgaatgatgacactgaacatctttctcatgagcaaatatggttatttgcatatcagaatttttagtcaagtgattgtttagacgttttgctcattttctattgggttgcttggctttttattgagttgtaggatttttttatgtattctacatgtccattgtaagaatttaaatttctgataaaagattaaaaaaatctatagtaactttttagcagctttttcattcatactagggacttgtattacaggttccttctcttgatttggattttggaaggcaaaattttcatcagctgaaatgtattagttcttgatttctttttgttcttacaatagctttgtatggctattacttgacaatttccaatcattttgaaatgtcttacattttcctgtatctgcaataacaaagttaagttgacagggataaaggcttttggatggctttttatgtttcttagttcaagagagacacatttggtttttgaaaaatgtttgtgttgaagtctaacatacatacagaaaagtgcaaaaagtagcagtgtgcaggttgacccatttttataacccggatagccttgtgtacccagcacccacagtacaaaatagaacactactgggcccccagtgggcctgccttgtgccctttctaaatcccagccaggattacctctatccagacttctaacatcatacgtggatttttgtctagttttgaacttgatataaatgggatcatacagtatatattcctgtgtacttagtatctcttacacaatccatgtttgtgagattcatgtatatagttgttcattctcattgctatatctgttgtttgtacagttgagtgacacgtgtgtatgtttcagtttgaaggtgtaatgaaaggtcttgctgtaaacatacttgtatatcttgtgaccctatgcatttgggtggggctggatgtagatccaggagtagaacggctggatgaaaacatacatatatcaaaagatacaagggtaacttttttgtttgtttttgagacggaatctcgttctgtcgcccaggctggagtgcagtggcgcgatctccactcactgcaagctccgcctttcgggttcacaccattctcctggctcagcctcccgagtagctgggactacaggcgcccgccacgacgcccggctaatttttttgtacttttagtagagacgaggtttcgccgtgttatccaggatggtctcggtctcctgacctcgtgatccgcctgcctcggcctcccaaagtgctgggattacaggcgtgagccactgtgcccggcccacaagtataacttaataaatactgtcagtttttaaaagaggttgtacgctccaactagtagtttatgaatgttgcatgtatagatattattacattatatattataaatttaacattttactttttaatttaatattatatataaaaatatatgtaatatatacgtgtgtgtatgtgtacatacacacatatacagtagttgcacatatttggctacactttgtgtttccttttcattttagccattctaatggatatttagtggtattgcatttcattttgcatttctcagatgactaatgataccgaccatctttttcatattttttttttctggctatgtatcttggtatcagatatatgtattgcaaatatctgctttcactatgtcatttgtcttttcattctcttattcataccttttgatagccaaaagttgttaattctaacatggtctaatttatcaacttttccctttatgttatagcttcacatttatcgtttaagaattctttgcctaatccatggccccgaacgtgtatgatttttatgattaaattttaaagttgtaaacctcttacttgaaagttaaatatttccatgtagaacttggatttttcatatttttagaatgttaggccatggatgtaagtttattttacacatctcatgtataccatttgtacaaagtatgtgttccttaaatatttcctgaatgaatgaatatagagatgcatgaaatgctctattgtttaaacactagaaaccaaaacactgaactttagaacatttcctgtctcattttttgaaaatcaaagtctaaatttcagaaagtgagaaaagtataattttcacttgtctgcccattttagtcagtgtttcagcttaacacaaacattaaaagcaaaaatattttggcactgctgggctctgatccacagctcttcttattcctgggcccaggatgataacacattcatgaggcagaggggaagacaagttcaactacacagctgtattaaaatttctgctctcctgcgcacaccgcatgtccactttcatttctttggccaacacaagtcacatcactaagcctaagtcaatagttgggaatctgtaaatacataatcttcttataggaaaagagagtgttaataattttgaatagttatgcatgttaccattctgtctcacggtagagtcagtaatgttttctttaaaatgttttatatgttaatcaaaatattatgtttatatttaaatgtattcttttttatttagttcatttaaagaattgattacatgatttcagcatttggctcaaaagatagaatttatctatatctatggcaataattaattgtcaagaatatgtttcagtgaacgtgtgcatttttaattttgtcatagattttgcacaaaagacattcattatttattttggcagtgtaaagagaaaaatgagaagattaaattatttggaaaatgctgtgggaaagtctcacatacaccatcaattccaattgcctttttttatactatagcttcccttcttaagaaattttccttgatctgtgtaaaatattatattttagttgcactagcagtgcattttctcatataagcataaaacttgaaaattaaataatatattttagaaaaacacacgaacttgcatatttcttaaatagtgcataatttttatgagattcccacgtatatcttgtctaaatattcctgtaattcttactgatttattttcattcatcagatttctcttgaattaaagacaagtagttgtcttcccagattgagcaattattgatatcttccaacacccaattccttgtttttattctcctctctactgccacatagatgactccaacacactggtagagagttttgctctcttcatgttccaaattatagcatttttgtgaaataacctcaagctgagtaattttataggaataggttttattataatatatgataccaaatatcacataaaaagtggtgacagaaagataagatttctcaagtagtgttactctgaaccataaggagagaagcttaagagaagaaaagagttggtagaaatataattgttctctgctcaggttgtagaccagactctacgtctatgtttctgctggtagatgcttccttttatctccctggtctaccctgataattaatttatatgtctcccatttctttctctatcagatttttctaattcgtgttctgtacccaccttctactcattcatttcctcagtccttatcacccagcagtcaagagtctgtccattctacttaactgaaaaagattatgtcattaccagctccgtaagtttttcttcagttctaattattctggacctattggaagtgtttacacagttaactaaccttgcctccttaaagttccctcctatctagatttccattttacaatattatcttgatctaactttattcttgcccttgtttttttcttttctgaaatgtggacatttccattaaaggctcttgttctttttctacaatctgtctcttagacatggcttttgataggtgattgccaatgtattttcctagcatcgtcttctcttctaagatttagtttctcatttccaaatggcaggcagagttttctgcatcataagttcagtatgcctaaaactaaagataattcctaaccccagatttccttccttatctgacatttctatttctgttattaatgccccattttcctcaataattggtgaaaagaatggaccattttgccccacaccatcacctcatatcaatatgtcttaatgtgcctttcctggtatgtatagagtttatcctttcaattactaattcagttacttgtctgtccttgtcttattctcccaaagcacagcactcacctcttttctgtgtagctaagttacgtctcctccctacatttcatcatgaattttgttgccttagtctcaattttgaaaatcctattcctgctctccactcaaattttaatttcttccattaatttatgggatatgtttcaaatgggtggctcaatcatttcagtgcacttaataggggagatgagagagaacaatacatctagtagcaggagtccaagtgtgtttgactactgaaaagcaatttgttggggcaaacaattctattctgtggagtggaagagttgccaggaaggactgcatcctgaatctgacagcaagaacacaacattcaagcaggccagagtaagagaagaagagagtgtgtaacaatgagaaataaaaatcactaggacaagtttgttgaaaatgaccaagagcataaaacgtagaagatggagatgcagaagtcaagaaggccaggataaatttgatttgccttcttggaaagtctaaagcttgtatcctaaacttaacctttgctgtgactaaaggaatagcactctaaaaatgacttagaacacagcattctttttcatctttgtcttctatacaaacttctcaagccagattgtacagatgtggtctcacctatttctccagatttatctaactgtctccctcacaaccagccttcctcaaactttccatacctctaggactttgtacaattcccgccaaatccttcatattctctaaaaacaagctgaagtactatattatctaaaactgtcctcaatttcttttaatcaggtattttgtatacatccctataccatttatcacattgcattacatttttttaattgtcttttttctcaactagaactcaatgtcagttatgggcttattagtttttcttctttgctgtgtatcggagtactattcaacaaatgttagtgttccatagatgtatgttgaaaaaacgacagtccaatgttcaccaaatgatatctgctttcctgccttcaaatcctagctaaagtttttctcttcagacatggcttctggagtagttgctgtctattgaaactgagttaaccaccacccacctatgtagggcttttggttaccagcccagcctgaaggaagatctccttcctttaaatttttattatcctgcctgactgtatttttactcaaatcagtattcattcattattcactattgtgttcttgagatgttatttgattttcatatatggtcttgagctcttatttgattccacaggataatttgttaagacatatacatttaatattttcaactaaactggaaattccttgaaaacagagattgtgtctcttaccagttttaatgcattaagcaaaaagccttatacagggcaagagctccacagtatgtgttgagtacgtgggatactgagtagagtggagatggggccatgtaatggtaggactggagatggggccatgtaatggtagggggaaggcatcattcataggactggagatggggccatgtaacggtagggggaaggcatcattcataggactggagatggggccatgtaatggtagggcgaaggcatcattcatagggctggagatggggacatgtaaaggtaggggggaggcatcattcataggactggagatggggccatgtaatggtaggggggtgacatcattcatagggctggagatggggacatgtaatggtagggagaaggcatcattcatagggctgttgcatattgcccctgcttcctaagctgtggaaatttctatgagaaaagagcattgtatatcctatgatatgcagggctagtatgtgctctgaagggtcagtaaagatcccaaaattctgaaggctgcaaaccatttggttatagggtggtgtttcaggaaattacctctataggcctcttcatggcaggtctttccaatattaacttctattactgaaccgattctttaaacttcataaatattttaagcaagaccctctgtgtttctttcactcttgtcaaaaacccatttatttttatgactctctgataatgttttcacattgatactctgagtatccaattttgggttgacaatatgtctttttgggttgatgagttttgcataaatttaaacttcattatatattgattagcaggaatgtgggcataagattccaagtactgaatggcatttaaaatgggatatatttaaaaccaaatggcctagaccatgcgagtatattgctgtgtataatttcctgactgtactcactacatcataaataataatgaaagtaaatgtacatttatcagaaagaatcaacaaaaccccagcactgatttgctgatcacacttgtcttaccaggcattaaggccagctttcgaacaaaagtgcctgaaggtttgattgtctttgcagcatcacctggcaatcaggaagagtattttgcacttcagttgaagaagggacgtctttattttctttttgatcctcaggtaaatgagaaatcataaactttaatatttttaagaatttagtaggtgcctggtactgaggtaaatgcttctgttttcacactgaatcttcattcaaaccttgtaaggtaagtactattattatccccattttgccaatcaagaaaatgaaacttacaaaagtaatgtgacttgccctcagctaaaatagcggagctaacttttaaaccatcatggtctgactgagaatctgtgggcttaacaaccaaaatgccaccttataatgaagattaaaacttttaaataaatttaaagagatctatttttatttttcttagtagcaaaaaatcatgtccccttttcttccttccctgtctttcttttttcattgtttcaccagcaaatatttaagtggctatcgggtactatggtactgggcgttgcagactaccatagtttcaaagttaaatatgaccatgcccctgcaaaggatacagtaaaataatcaatttaaaattcttataaattgtatcaaaataaagatttaggattctatgtattataggaacataaaataaagaaataaattgttttctgagttgtcaattttctctggaaatgtgatatttaactgagatacaaatcaatgaagaaaagttggtcaggacaagattatatgtctgtatttgagggtgtatatttcaggtggggcagtacaggggagattctgatctccacctgggaaggtgctgagcataaagtttccaggcaaagtgagcagcaaatattaaggaaatagcaaatattaagtgcctgaggtggacgagaacatggcacattcagtacactgagatgaatctcttatggctgggaacagagacaaagggaaaggtggtagattgaaaagctgggtagaaaccaagtcatttaagaccttgtaagcaaatgtgaggatatgaatttttcctaagggcagtgagaaagcactgaacagttgtcttcacttgagttgaacaaatatcagtgagcatttgatattaggtattgtattaagcatgtgagatgagtaagagaaatgagtaagactaagtaaaatatattagctttccattttctcagttcttcaacttaaaactgatgatctaaatcacacgttatgcttgacaaataaatgttttacattttattggtaaagcagacacaacgttcaccctctgtatccaagttgcgtctaggatcatggactgagtgatctgactgaggatctcagcctcatgaaccctggagatccattgaccttagagagaaaaggcagggcctattgtaccaagtgtatctgaggaccctgccagactcaaaaagcaggccaaagtcctcctgctttatgaagctgggagagccgcacagtggccactcgaaggaccagggacagaaaggctccctcctcatgacttgacagggctctgctaactccctggctggtgcacagcaggtcctcagacacaaagatttctgagcgtcccctagtaatgcagcttcttaaaggatgccagcaggtgggcagtgagtaagcaaaaggaaatagcatcacacctaagcagatcctgcagccagagggaaaggaagaagcagcagctatcgcagaaggcaagacagatggcaactgaaaaaaatttttaaaaaatcagctgaagttgattcaattacataatggaagatattattttttatttgaaaactttaagtagattaattagaggagagacactgagcctcagattagtaggtcagaagattaagttgaagaaatctctcaaaatacataaaaatgtgacaaaaacaagaaagttagatactactactgtcactaagaagcgaatcggaaggagaacaaaaagcacatgctcaagaaaaagagggataacataaaatgatgaaacaaaaaataggagagaatatctgatttaagagggaatttagtataaatccattgaaaagactcatcaatttcctgtcaagattaagcaaaactaatacttctatgagacctctttgtgccaggcattattctaagtggtctctctatacatcagtttgtacacttacatacacacatatgcctatacacacacacacacacacacacacctacacacgcacataaactcatttgaacttttcaacaactctgtgaggtagatactcttcatattcccattttacaggtgaggaatctgggccacaggtaagttaattttccccaagtcacaacactaataagtgaccaagccaggttataaacacaagcaattgagctccaaagaccatgattttagctacagtgctatactgcttttcaacatgaaagaaagatggttgttgatatccataaattcagaaaaaaaaaatccatctctgcaccaggttggaaagaaatatttcagtaagtaatctagccaaaaggaaaaataacagagtcagaaatataaaaagaagaagcatcagtgaataataaatctagtaatattaagttatgcctaaatatttaatgatagagtgactagaactctgttttacagtgccaaatgagaatctttgaaatagaagagaagtatagcaaaggcaagaaaaaaaacgtgaataatcatttgttgctaaaattagtaagatttgaaggagaggaaagatgagtgaattaaaagttctgaagataccagcttagtggcggggtgtgggtggaataagggaatagattatactgacgttttgttttcgttaaataaatagggcaaatgtttgatttcaaatgttatagaaaaataagttactactaataaaaagtgctcttcaggacatccaaattaacaaggttaaaaaggacagcaaatgctaagttaaaaaatcaacaaaaatcagaaaaagaaaggggagagtacagtaaaatagaagactgtcaatgagaaagaaaaatctggctctgctttttccccttcaacctgttagtatctggagatatttaagaagaagccagatggaaaaaaaactaatcacaggaccacttgtttatagagctttaaagtatacaaagtgagttcctgttaatgatctcatttcattcttgaagtagccccttgaggttgattttgttttcatccctgctttagatgaagtggcttaactacggtcatagagtggtttagggatagaactagcactgaattcaattatttgaatagcactgaattattttattcaatgaaactttgctaagaatttattggacttcacagttatgcactgggaacacagaaatgaacagaatgacactcattggaattctggccattggttgttcatcacagattttgagtatttatagccacccccctaccaaacatgggacagtcattggagaattaatccaaaaatgatttccccaagtctgaagcatgactgccatctcttttgacatgtggtgttgctatttctaaaggatgcgataccttaagactctgtaggataggagggtaaaggggtcaaactgcttaacggagaatggctgccaggaaactcatctggcaggtctagttgttttcatatcctttacggtgatcacctggacaggctggtgcaaagcgtggtaacagaattcagggaaacattcacagggcatttgcccatcatttccgcccccttacccttctcattcacacaattgcttagagtactcgtcactgctattagttttcccagttgctctgtccctaccctgtatagccaaaccctaagctgtatacatagtccgcaggtgccagccaagtattaataaaattgttaaagccactgggcgtggtggctcatgcctgtaatcctagcactttgggaggctgaggcgggtggatcacaaggtcaggagttcaagaccagcctggctaagatggtgaaaccccgtttctactaaaaatacaaaacttagctgggcgtggtggcaggtgcctgtaatccccgctactcgggagactgaggcagagaattgcttgaacccgggaggcagaggttacagtgagccgagactgagccactgcactccaacctgggtgacagagtgagaccttgtctcaaaaaaaaaaaaattgttaaagccaagttgggggctaaagggagtgaggaaggtttaatgatgtctagtaagtaaatttttatctgaaataatctctctccataaggtaaaactgcttgagttttcaggaaagtgacaattattttttaaaatacaagatatgggttgagcaggatggccttaggatctagctgagaaaatgtaatcagatgcattacactatgtgctcacgggccatgaggctctctatatatgaaacaacgagcttatgctagcaaggactgtgtccttccttacttccaatgaatttatactctaaaacaggtactaaacatattttctaaatttataatgaaagccccactcatttttagacaaagaagtgttaaaactgagggatggtgaaaattttgaatactcttctcttatttgctctctttttccaaagtaatatcaatgcagcttcttgtatgaagttagagctactctgggttttaaaaagtatagaagtttatttcatatgccttctattggcattacatttatttatattttaaatactttgggtaccactttaagtcagtttttctcctttaatctttaaatgcggacgagattatctagtgaatactttttatactcatcacacaagtaattatgtacttagtgtgtctgtcttatcagactgtatgatccagtgagggcaaagtctatgaatcttttgcccacaggtacttcctcaggacttagaacagtctttggaacatagtagatgcccagtaaataaatgaccattgacatattacctggctgattgactcaataactgttggtaggatactactactcataactgaagaaaattatccatttttctggcttacaacgtctagctttgtaatgattacacagatattttgtgatgtttgttttatttttttttattttgaaaaaattagagaaaaagtcttgctgttttgctcaggttggtcccgaactcctggcctcaagcaatcctcccaccttggcctctcaaagtgctaggattacagacatgagacaccatgcccagccttgttcaaatttgtctgtttttcagataatttgatttttatcaggaaaaaacgagatgcttatttttaaattgtttttactgaattcattcaaaatagccaaattttgaattatgaagagaatttcaaggaattttaaagtagttatctagcacatatttataaaataacttgaagtcattgtgtactttgctctttttaaaatatcttaataaaattgagtattaaattccttacaaaacaatttaatacaacgtagaggctatagatataaaaatgtatttggtttgtcatccaactatccgaagcattctattgaataaatgtttagggaaagggagattcttcatagtacataaaattggaaatgtgtttgtatattacaaactgggcacttgccattgttaaaagatacaataaagaaaagttaactgcaacttttaattacagtttttattgttatctccaacaattttctataattttcccattcttcacttaattaaattcaattttgaatatacttgatcagataatattttagtgaccagtaatgatctatgtttatcccttaaatattctatgttcagtgacattaacaggaaattcacatcatattctgggcttacttggaaggaagctgtgaaaatgaaagctttaaaacaattctgaatagcatctattgaatgtgtctgatatgttccaaatagaaagaacaacatgcataatatgacaccagaagtcatcacagaattgttctttcaacattgatggggggaagtaatcttaaaatagtcttcaaaaaatgatattctaaattgctgtaagtataaagtgagtttgtcatgctgaggctgtaggtaatgtacttgaatttgtctccaataaacttgatttctgatgtagagaactattaatgcttcagattgttgccaaacaaaatatgaagaaccacttattcagacacctgatctttagaatgcagcatcgtttgtaacaattttaacgctaactaagtacactttgatgagacagcatttaataaaatgctcattaatttcatcattagcaagggtatgctaagaagtaagccagtttcttatgtcacgcccaattagcatcccatgctagtaatcccattagtattgttgaattcactaatggaaaaactaatgggcatgctaccagggcacattaattgggcacgacaccagttctggttttaattattaaactacgataatgaaatgtgtgtttgtaaaatattaaaatgttgaaatagggttgaagaaaataaaagggtgtgtagacaaaacagatataaggaaagtcaacctacaaaaatacgaagactagaacttgccagatggtcatgtttctagctgatggagttgtctgtaaaagttgggatattgtccatgtgagagacaacccactcatactcatgggaaattaaaagctttttttttttttttttttactttggtaacatgaaattctgtatgtcatacatgttgtcgagctctttatgaggcccgacaggaaccaattaaatgtgtagagtggacatgttgtatcactgaagccatttcagagaaagataaacagaaatcatactaaagatggtatgattaacattgtatgtttttcaatatacatcttcagcaccattacatcaaacaattatctattttctctttttgaaaaaaacagcatagcaaaattattagagtttggtgaaattttctggtaattaagtgttttggtaatattttacccaatctaatttttttaatttttaaagattttattagaatgagctttattcttgttaagtaaatcaactttattaagaagaaaattcattcccatttagaagttgtaatttcttttttatttttatttaatagtagtactagtagctgttggtgacaaagttgggatatctttcacttagtcttattcacttaacacagaaaatgttactataggtaaccaaggctactataacatactggaaaattgtttacttttctcgaaagtagtgagatggcaggtgtttcttctatttctctttctcagtttttttttttattcttacctcctatttgctaaactctgttcttaatatctgccatttcctatgtcttatcacttaggaacatgtttttaactattatatgattaccttagccagaactataattattggattttaactacaaagcattgtgtactacatttaactccacccttatgtttaatgtatcacaactggctagtttttaaggtgaatgtcattcccatttgttattgataattttgtgaagataagagtgacttgtctgacatctctctatcttcagaactcattttgagtggtattttatgagttttaaatttttctcttctttttcatatttatgccatgaaacttaaagtctaaaattttagaatagaaaattctttacccttctgatgaatagctatattcatcagaaaatgcaagtgactttgtaagaaattcttactgcaaaggtgagacctttacagatctgtacactgtggtgcacagggaagtattaatacatcacaggaaagccagaatgatgctagacatcagctttaattttgagttctgtttgaaatgtatgcatgcttgtatcaggatcataatcttgaaacttgtaaattggtttataacaaatatgtgtgtgtttatttgtagatatgcatgtataaacatttatttattcattcattcccttaaggggtcaccagtggaagtaactacaactaatgatcatggcaaacaatatagtgatggaaaatggcatgaaataattgctattaggcatcaggcttttggccaaatcactctggatgggatatatacaggtaagtactttttgatatgtataaatagccctgttgatatgttggtgttgccatacttttctgttgtttatattcctacattcttatttcaccataatttctactcaattccatatatattgctgttgaatttgcctttgggatgctcctaaaaggatgaagtctggcaaccagtttttcatccatgaaggtctttggtaaagaaaaaaataacaatgaagtcacctatgtcttttacagttctttacaattcgtgtggacctttagttatgttctgtcatcttacttttgacttccaaaaaacacatacagtagaggaaagcagtttttgtctgcatttggagatgaggaaaccaaggctgagaaaaaagtaaatattttttcctaacttacacagttgagaggaagcattcttgggacacacatcctgttttttcacatttaagtttagtttttgctccagcctaccctatctgccacatttatgtaattataacatgatcactgtacctgtataatgatgcaggcttttattaaattattcaggaaatatctaattttaatcagtacctattatgttccaggtattgttctaggtgctctggatacaaggagcaaagagaatactgtaaaacttacattttatgggaggaatggggcagcaaaatacagaataaataaatttaaacaaatatcaagtggtgataaattctgagaatgaaaaagccagatgagagggaaagttgtgtgtgtatgtgcgtgtgtgtgttaagaaaggtctctctgatgaggtgacatttgagcagagacctaaagggacaaaggggaaaccatgtaaatatccaggaagaggatgctttgggttgcgaggacagcaagtatcagggccctgaagtgagagcacactacatgtggcatgtcaaggaccaacaagaaggccagtgtgggaaagagggtgtaaaagagctaatgacatgacataaggtcacagaggccattagggatcagattatatgggaccttgtgggcttttactttgaaagaaggaaactgttgaaggattttgagggaagaatgacataatatgacggctttctttaaaaggatcacactagctgctctgttgagaataaattttaaggggaatgagggtgaaggcatggagatcagttaataggcttctgcaataactctgtaataattcagacaagaaatcatggagacctgaaccagggtgataattgaagatataataagaagtattcagattctggttatactgtgaatgtcaaattaacaggatttggtgatgagattgaggcagaataggggttggtaaactatcaccatgggctaaatctagctcatgcctgtttttataaagttttattggagcacaactacacccattcatttacgtattatctatggctgcttgagtctgaatagtctacaaagacactgtctggcctttgacagagtttactggcccttaatgtcgagcaagcctgtcaggtttgggtctcaggcaactggaagaatgtagctgccaaaaccagggagtgcatgactgtgggagaagcaggtttggggagagacattcaaagttcagttgagaacatgttaaggctgagatttctaagacacccaaggggagatatcaggcaggctgctcaagaaacaagtctagttctgaagtcagaacttccagcaaaggatggtattgaaagccaagggaacagatgtaagtagggctaattggagtggattgggctctggaaaaacaaacacaaataactttgcctcttctctcaaagaaggtgggcattagaaatatgaacagggatttccattgttatgccacacagtcagagacccaggttcccctggcctttggccctggcagttcgtactggaacccagcccactattcatccctctagagtacttagggggtgcctatgggtagagaaaggaagaggcctgagaggcaggcggtctggatcattccaacatcatgatgctgggatgttgaggaagagccagtgaagaaaagtaatgaacaggcaatgaggagagaggaaaaccaagagagtggtatcccaaaggctggtgaaggattttattatttgctgagctagtaaaactagagtatcctggtgaaggtgtatttctcatctcctcttctctaggttcctctgccatcctgaatggtagtactgttattggagataacacaggagtctttctgggagggctcccgcgaagttataccatcctcaggaaggatcctggtgagtttagtaaggtatattatatgttgtcatccaaacttagaatagaacctgtttacattattttaaagtaagaataagtattatgttctacctcatgctatattttctatattaatgtgccaaaaatttcctttaggtctcttttttttaaaggaaccatgtattccatatgacttgtatttatattgttagtactcggttcttgatatataaaaggaattcattaaaacttttgctgaaatgaattataataatttcagtcaaaggtatgttattttaggacctatgcatagttttttctaagattttaaattgaatgtgaaacaacacagaaatggaaaactatgagcttgatttatactctaaatagggtgaagaacattccctgaatactatgtgataggcactaaaccaatccctagatattcatagatgaataaaatgtggtctttatcacaatagaggtcacaggcgtataaacagacaattccagcctaatgccattagtgctataattgagctatagacaaagtgattctcatatttttagaacaagagcataagaacatattctaaaatgaaactaattaaaatgaacatgaatggaattaaccttagataggaaaaaaaatcacccttcaaacgcaatgctaatattctaggattgtttcccaagtcctcattaagaatcacagggtgcctcccaagtctctcccaggaagttaaaatataactacataaatattacaaataagctagaacccagataagtataatttgttcatgggttgcagtctcagggaatcatgatgaagatcaaaaggaatagaaagtgttcatcaaatttaggagaaggatatagttgaatcctcaaggctgattatagttacctcctcagaaatgtctctagattagagagggttttcattcaactacttgagactgacagagaagtccctctaaaacacacacacacacacacacacacacacacactcacgtacacagcctttgttttttgcccttctgggaaatagtatcttcaggtactaggagagaataccctgatactaagtacccttcctgtagaggacacatctccattatgaataaccaattttactttgtctatgtaaattggccttataaaactctcataaactcaaagctgaaaactaagctttgcccccataggaaaggaggtggctgtgtgaaattcgacctcagtgcaccttctcctcctcttgatttttttttcttgctttttctctaattctctcatttgcacattttctctctcaaccttctgttatcaccctattcactgtatttataaagccacctctacctggtctggagagttccacattcaagatcaacactatatacatttcccaaaatatgaagccaaattattgatttacttcagtaacagactggttcatagatgaggaatctaaactgtaaactatatattaaatagaaacactcccttccaatctaacttttaaaattatagtactttatttttgaggctagtggcagatgaattttctgtgttagttgaaaaggcaatattcttgctactgcaaaaccaaggtttctgcataaacatctgtttctgcagatatgatgggtttgaaccagcactaaacattataattgctatcatttactatagctgatggtgtggtgtttacatgaatcattaagaggcttgcagtaaataggtagtgagagctagtgcctatttctttgactttaatggcacataaaattaattgcttgaaaataatctttcaaaatatatatttcttgatatctataaactcctgcagagataatccaaaaaggttttgtgggctgtctcaaggatgtacattttatgaagaattacaatccgtcagctatttgggaacctctggattggcagagttctgaagaacaaatcaacgtgtataacagctgggagggatgtcccgcttcattaaatgagggagctcagttcctaggagcaggtaatgctctaaaaaagacatgagtgttcacttaaaatctatgttctatcctttgtataatttaatctctcctgtttgattaacttgacctcatatgaacctagtatcacagaaatacttagttattccaatggtgcacacaaatatattcttgacatctgaatatgcaatataaattataagactcataagtatacatccatgtatgatatctctggtaactcatgcagttcttgatttacatatgttagcatcaccaatgtccatttgcaaatcagttgtttggaaactagaatgcagttagagaggtgtacttagaatgcactcagaaagatgtttcaaagagttttgtttactaggttaatccacaaatgcctatttatctcattatatagaagaacaatgttcttagttaattctcggctaggtaatgggttaagtaggccattgagagagaactggagactagaaccaccatccctgccattgctcaaaaggctacaatgaaaggggaggtgtaagtgtctgtagcttacccctgacatgcatgcacattgagtctctgcctgatcagagcagagacttccacccaggggaaggggagagggatgatggtggcttggtgcacccggcttgttcatcaaataaaagcccatcactgcctcctatatttacagctaagttggttggttattaagttgcttaaactgccttcagcacaaaaaggcatatgatattaataatataatctacacattttttattctgttttcatcaaggtcattctgagtttcttttagtcaatgcaaactacttattgttaatatttatctgaaacagtaataatcttacatgatacagacaacacatgatttagagagcaaatttcttcctgttaaaaagtataatatatatcaaagtctttcttagtatatcaaggtctttctgtcacttctgtgcaattacaaaaggaatttcttaacattgatttgcatcttcttttgtgagatttactcagtggcagactgtgtcctagagtttcttagcacccttacaatgctggcaatattgtgttacacatgctaatatgtacatatttttatctttaaagggttcctggaacttcatccatatatgtttcatggtggaatgaactttgagatttcctttaagttcagaactgaccaattaaatggattgcttcttttcgtttataacaaagatggacctgattttcttgctgtatgtgaattaatttgattaaaattactttaaaatataggacccaactttaaaataaataaaccatgtgttggcattacacttaattggggtttctttacaaattcacatttgttcattttttttcccagtcatttttagttttgaagtcctgtgaaacattttgtattttattatcctagtaattttttaagatgacaattgtaacaattataattttaagaaaacagactagatataaggaattaagaaaattcaatttagtatcttaagatatgaaaaacactatttccctcattatcttttgatatgagttttgaaagcatatatattatatatttttcatatgacatatagataatcaagtataataatatagtgaacactcctggacctaccaccacgcctgataactgaatattatcatttttggtctatctataaagtctttcctatcttgtttccatctcctttcagatgtcataggtaatcagaattttgtatttgttattcacatgcatttttatagtttgaacacctaatgaatgcctacaaattcttgcttttgaaatttataaaattggttttatactctctctttagcactcaacattgtttctgagtcatttatgtgtccacataggtatacattttcttggctgtgtagtatttctcttctcttaccaatgatgtattggttgttcccatgttttgcttcaatgaataagactgctataaacatttttatacatttctctaaatacaatgggcaactgtaactgcttttccttgtctttaatcattagtttgataccactgttaaatacgttattaaaattttaattcttaaaagttgttttaaagaactagcatagaaacaggagaaaaatatgaacatcttacccttagattcttgatttctaggcaaatagacaaatacaagtcttggcttttaagagtctaagatacgttcatctttttttttttttttttaacattcctagcatacacaatgccaatattgctaagaagggaaatggaaatttatcccttcatagtatttattaaaatttctgcttttttaaatatttgtttgtcctcttgtgtattgttggcttctttctctgaaacgtaatgtctatgaatcttctctgaaatgtaatgtctatgaatcttcgctgaaacgtaatgtctatgaatctaaggaccttggttctcttctttatagttgtatcttcagtgcctaagccttagcaattatcatgttaatcaatattgttgaatgaatgaatgagtgaacatgtgaatgagctcatgctgtggtgaccttcactgagcatcgttgagtcatctacatgtgcatacactgtggaggatacaaagatgtttaccatttggctcctcctcttgaggaccatatgcctgagctggaggtctatatgccctactatgccatgcttccaccctccaccttcctctattcattgctttgttactgtattaaataatactgttaactttaagtaactcttactaaaaaaaaaaaattaaaaaattaaggctgggtgcagtggctcacccctataattccagcacttttagaggcctgggattataggagggtagcttgaggccagtagttcgagaccagcctgggcaatatagtgagaccctttttctatgaaaataaaaataaaaataaaaagttagccagacactgtagctagttccagctactcgggaagctgaggcaagaggattgctgaagactgggagtcgaaggctgcagtgacctgtgattgcacctctgcactccagcctgggcaagagagctctgtctcaaaacaaacaaaacaaaaaaaaatcaatacacttagataaatatatacggagtgcctattatgtgcttggctttcttttaacacttcccatgcaactgaaaggaagcagtctttcataaaacttaacattacggtctgccatatctgaggactgaggctgctcccagattacccctcaacaactctttctattatactgacttatttcaatatgcatggttatcccctggaacttgataaactcagaatgtttccattgctgaaaccttgaatctcaaaatataacctcatatccctctagctctctcagtctctctcattaagttcaccaacgcattgacaccattggctattagcccactttctagttaacttacttgctccttacctgagccactataatgtatttcttcaaccatatttctaccaataccctgatcttgtgtcttgtattgggcttcacaaaccttgatccatcagtccagccacctcgcttttcagttctagtagctagattgctaaacactataggaaaactaatacgggtatgagaacttgttttgagctctccaattcttttattaaacagtatctattgtttacaggattttctaatatattttagatgtagaaagtgaaagaaaaataatcttaggatctagaaacactataacctgaatgtcttcaggtagtctcacactctcctgataaaaacaagcatgcatattcaactttcagtctctctatcaacttgaccgtatttgagccaagccagatttcactctctaccgactcaggggaacaaatgaacaattaccatgcttacaaccaaagaaaatatgtctaccgtcatcctagattctatcccttcctctgtaagaacttgttctacagtctcccctctttgtatgttcaactgttccctctcaattggctcttttccctcaatatatggaatgattgaaatttattttccttagtgttttttcttttgtctgtgaagcctcctccactgtacttttccttaccttcatggtcaagtgcattgaaagtggttacttttgttattgccactttttcatctcacttcagtccctaaaatgactgtacattaggttcctgcccctaccacacctttctacaaaatcacttttctaaagtggtcaatgacccccacatttcctagcccaatgatttttatttcttatattttttgtcctttttctgtcattctgtttttttcttattcttccctactgattttccaaaatactagtttctcctgatttcattaagttctcttagcttctttaaggagatcattgtcacttaaaagaactattttctactacaagacccttaaaacattggtcttgctgaggacactaatcttttcccttttctctcagtctttttacactcactgaataatcttatttattttgtcatgtattttctcctttttgctgggccatccccaaactgtgtatctttatgtttgacttcctcaaaaagagtttcatctggatgttttataggcatttcaaactcaatatatttaaaatgaactcacccctcctccttgtcaacaacaacagtcagcatttctttcaaatgcttttcataacgtgatgatggcagaacaccctcctagttacccaaaaaagatgagatgtgttcttaatttctttttaattcatctaactcatttaccttttttaccaggtcctaatgagttgcttttacaaatacttctaagattgagtcttctctttcatcagcatcatcattatccttattttaatgactctcaatatgttttcacaattaaatggatttcctaatgcatttcctgaattctagtcgagattttgttttcaatgtgtacttcttatgtctggtaggctaagcttttagtgcaaggtaatactgggaagaatatgagttttggtttcagacagacaccaaacattctttccataccagaccctcctatcactgaaagtcctttaaaatctggcttctacatagctggcaagacactacctcacctcccacctccatatgtaccctttgtcttagctaagttggtgcctttctctgaacctgatgtcctcatgtcatgcatattagtccccctccttgggggaccctccatgaatcttatatagtttctaaaaccttgctttaaacctttcccaatttccagggagcaaaaagccttctctgttctctgctttcactttactcctttcttgtcttgattgttgtattgctcccacatgtttgcctctgctactagacagtatgactcttaggagcagtgtttaccttagagcagcaggtatatggcacattgtaagagactcgatatttattgaataagtggttagacaaatgaaaaattgcttacctgaggtccttcctgaagatgatgcttttatggaaaaattcataatttttatctggcatgatttaatttgttttactcgacacaattgatctcaagattttaaatatcatatggttactgatatggtttctaacaaagtaaaaatatattaggtaaaataattatcatgagacattttgaaggaaaacctatgaacttattttttactatgaaaatttgggtgaaatatgttcacattagaaaatggtacagtcatctaatagaatacacatagaagcaattatgttagttaaagatttagaataaaaccgaaatattgaatcaaaatatgtcttacatatttgaaattgagttcactagccagttaaaataagcttaatcaagcttgacatttcattttcttattgtcttgccatattttcccccaaattaaattgatatatgaagtagtattttctcattttctaaaaattcaaagagtcatagttcaaagtgttctgttctcttcagtcattcagtcacttatgcaggggtttaatcttctaactatgttgcagcaaaagtaaaccttaggtctacataacatcgcatcacatcctataatcattagtaggtatgaatttgtttgcatcaatacaacattcttcatgtcaactataagctagaaaagtgtttcctatgttcctaagcagaaacttagggtagagtgacacatttctatagagtgctttcagggaactgttttgcttttcttcaagaaattgactttctgctctctcccaaactgcccttctgcagcctttttatatacctactttcttttttaatataaaatacagatggagctgaaaagtggaatattgaccttccggttaaataccagtcttgcctttacacaagtggatctattgctggggctatcctattgtaatggaaagtggaataaagtcattattaaaaaggaaggctctttcatatcagcaagtgtgaatggactgatgaagcatgcatcggagtccggagaccagccactggtggtgaattcaccagtttatgtgggaggaatcccacaggaactgctgaactcttatcaacatttgtgtttggaacaaggtaagttccatctggaggaattcacaaatccatacagccctggtgctaacagtttttggtggttctgtgtttcaagagatagcaatagactcaggctaaaagcagcacccaacagcatctctttttctggagaaatttaaaccttaaaaactaatgaaaacactttttcaaagagttttgtgtgttacccttaacaatgtgccatcatttataatcagcatatttatttcaatatgtcctcagtaaatagtaattaatatacatattattattaatgtgacatataattatatatgtggtacataattatatatataaattactatttactgaataaatatcaaaataaatatgttgattataaataaggtaactgaggtgcttcccaaagatgatatttatatggaaaaattagtaatttatatatttatttaaatatgtaatgcaattatatgtgagatacataattatataagaaatatatgtgtgtacatacataattatatatataattatatatataatgcatataaatgtatttcctcatatgttggataatgatcattatctgtatttacagatgaaaaaataaattaagttggtatgcataactagtaaaaaatatcaatgcaattcattgccttttctttctttgacataaatgctaattgtctccatagtttttcagtagagctttcatgtggaaaaaaaatgtggggtgtatgtggttgacttccaaacatacttgtgaaaatctatatattgtagattattaataactataagagaaaggaaaagtgcattatttacaatttaggtgagaagttaactcatagacgtttgaatgtaatcagagaaataattaatttgaaaaggctaacaatatctgtgtatcatttcttgtggcagtcatggttctgagagcttacatgagaataggtgagtcaattattcataacaagtgtgttaggcattattatttatatcctcattacagatgaggaaactgaagagcagagaggaaggtaactttcccaaggtcacatggctagtaagcagatagcaagacactaagtctctcaggcagcctgttataaagtcaactctcctttttacagtcaatgctctcttttatgggcattggtcaatgctcctttgtaaagtggggaaagcatagtaacttccagcataggaccaagcaccctcccacgtgtgaaaaaggtcctttacgtatttcaaaatctacataccctgaatggttaaaattttcatgaggcaatctttgcctatttggtaagtacataaagatttaaatgcctttgaatagaaaatatatggcaagctcttaggagacttttagaagggtagtagtaaggagttaatgaataactggggtgtaagacagtaatgacattttcaaggcacttaagatgtaacagcagctaaaaatattacattcatataagagcttctccaggttttcaggtttctgaggttagaaagaacttgaaaacccttcgtatgagtgagattacttaatcctgtttgcttctgggaaaaaaaaaataaaaacaagaaacaaaaaccctgcatgtacagccttgttctttgaattacccctaaacccattactattgatggtcctaaagacgtggctaaaaccaaaattgtaagataataacagaagtttaaaacatcaccatagacccaaagggaataattttacctacacactatgactaagtctgtgatactggaagatattttattagtgagtaatattaaatttttattactgtagtatcatccatatcagtggtctcaaaacactgaaaaaatattgacgtatggtagctggaacgtagaagtcaaaattagccattatttttactattcaagatacattgacatcacctggaatggttattaaaaatacagatgttagggacccctgtcccctaagattctgactcagatgccttgagagacactgatctatataaatagctgcatgttttatacggtgatcagggagactagtcacaatacagaggtgcagcatgtatgtagtcaattgcaattaaaacaaatcatgttcatttaatgtatttctttcaacccactatcaattgtcttaaaaacgtttttccttttctctgcttcttaattagcaccttttttttttcatcagaagctctattttgtggtcatattagtgctattttttttttaatctactaacgttgcaatcttcctccgaaccagatacaagactaattttctttcttgttttgaaaatgctgggcaacataatttgctgaagatgtgccagctcagatgatgagagtttatcttcttagaatgatcaatgaggataatcacttacatctaggttgggcatgactgggtctggcatgtggtctcacaggcaatgctctgcccaaacccctccatggagagggagagagtgggggctcaaatttagcaggcctgccaagccaagcactctgcagcagtactgccttccctagaggaagggctaatgtttttctgattagtcatcttagagctctgggccgccttttaggcatttagaggcccaggggtggtggtgtggatggggatttttttggattctcacaagggtagtggagtaagaaaagaaagcatttccactcctctcgcaaacatcccctttctccttttgttgtcctcgcatctcattcaaatgttttaggtctggggagcatttctggtggtacagagttgaaagcacgggacaaccttaactgaactctttggttgccactggaaggaccctgcactagagctcagcagcttcaagagctcagcagtctccaaggccagaggccagaggaccatttccttaggaggattagtgcttacaaacttcattttataactaactctctaggcctttttcttcatctccaaaatgaagaaagatgtatctccctgggctttcccaaattgaaaatttcatcttgtgaattaatttttatgatgttttttgctaaatttttaattttttaaacattatggtaaaatatatgtaacatgaaatttaccattgtaaccatttttaaatgtacagtttagtggcattaggtacattcacattgttttgcagatatcaccaccatccctctgaagaactcttttcatcctgcaaagctaaaactatgtacccctcaaaaaataatgtagcatttcttataacagcacttgtttgccaagctgccctttcactgttctgattttgttggtagggaagttagggtacagagaattttgataatacagttatgtgccatcagaaaattactactgataaatacattaaaattcttagcttctgaattttccagccaatgatttcatattgagcttcattgctttcaattcaattcacccaacttattgagtgtctactgtgtgtttaagatagactagcagtattgatcagtcaggactaaaaaaatgtggataatagtaaaagacatttaaaaggaaataggctgcaacttaatgtgttagaaggcataataagacatcatatgaatgctgaggagaacaatatggtcattgttactattaacttattttactgttatgcatttcattatattttatttccatttcctgctgctgtgctttaatcttgaaaagagctgatcatgtgtttgaggcctttcaaactttacagtgttttgttcggagagagagagagagagagagagagaacatgcacgctacagcaatctcaaactcggtcctgtttgtcccaatttcgtgcagttttctgcgcagagtactgccagacttcactgagctgatctctgttttcacaaaatagcatgtaattcaaagccactgctattccctggctaactggatgccttttttgtttgctgtctaacaaaaaagtggtgaatactctaaattcatttcatccgcattctctgttaaacttcacagaatggtactgcgcagtgggtgttctaaggtcacctgtgcagaatgcacattccatgaaatctcatggtgttgctattgccaacagtgaaggctggcccctgtcatgctaatggggatgtaaaactggtgaccattttgtatgttcaagattatggaactctgtgaaaaatgatagagcatagtgacagctcttctgtaggctgatgtaactcgggctaaattctatacctctgaagtgatcattatgccattcatggcaatatttcaggactaatatattttgaaattatgttctctctcctggtattctacataaaatgctcagagtgtatttttccccaatgagcttactgaataatcatgctaattcaaatattattttttggcacttaaaactgacttatatagtaacttaatctttcagaattaagagacatggggctatccccctaccataatatgaagttgcctaaattttattttatgggaagaagcggaatttagaaaatgtgggcctaaggaggtaaaataaatgctttttcagtaccaaaagttaaattagaattatccattaatgtgttttccaaataacagaactatatttctttgcaacaaattagcttgttaaaaagtaggaggcataaaaggttttccaaggaagactcgaaagtctagcaattgtatctaaccaccccccttcctcaaaatgtagtgctgcagaggacaaaaatgattggtaattaatgactcaagccctttatgcgatactaatcccttactatttgctaggtttcggtggttgcatgaaggatgttaaatttacacggggtgctgtcgttaacttggcatctgtgtccagcggtgctgtcagagtcaatctggatggatgcctatcaactgacagtgctgttaactgcaggggaaatgactccatcctggtttaccagggaaaagagcagagtgtttacgagggtggtctccagccttttacaggtaatgtggaggtcctctaaattaaatgttacatgtctcttattcatccccctttccctccctgccagcccctcattaatctatatgagtattattttaatcttgctgcatcttatttccatttaagaatacctgtatcgagtgatagcctcgcatgaaggaggttcagtatatagtgattggagtcgaggacgtacaacaggagcaggtaaatacttatcttcaaatgcatatgtgcacacacacacatgcatgtatttgtgcatttatataaaaggaaggactattaccctgaagcagtaatatttttgtagtcttctgacagagcatgccttggtttgaaaatacatctgtcaatggctaaaatgcttagtagatcagtgcttttcatttaccaagaattcactaaatacttgctcagacttgatcctttcctcttaggatgcagaagtaaggaaagttcaggttgtcttaaggatgtaatagtcccacctacctaacatgtctaaggataggtaacctttacagatggtgtagatagcaagaagctgaagtcagggattaggattatccttggctgggagtggcaccttcttgactttctcacagaaagcacatttgaaacctgcaactggttggaatcaggggtgtctatgacatcattgcagatgtttgccccgttgttgactattagaatcttagaatgactctcccaagagagaaattgctgattggtttaatatattttgaattggaaaagaaccaactaggagacagtatacattagacctaatctcagacaactgacttgttttgtacttctgactggccacaaaatcttttcccaaaataccaccacaggaaggcattcagcacaaagagttttgtgaatcagtgacattctactattttgggtcaaatatttgtcaggaaactgaacacatctccagatgattgccacttatgtctcagcaaggaagtttattcagcgagtatcaatttgtctaaagacgtgtttccatcaaggtattctcttatacttaatcaacagtaggttactatcccaggcatcctttgaggaatcttcttaatctaaaatataattaaatactgagatgagcaactaagaataattttcaagactctctacctacatattttccagaagaggacaacttgacacttttccaggatgatttaaattatcacctatttataggcaagacaatgagctgaacgatctcttaaaattcttttcaacttcagagctaagagaaagctccaatataaaatactcacttgttactgacatgttctctgctcctatttcacactcttctactttattaacaaatataaagcccgctttgagtataattcagcaacattaataggcgtctggaaagcacattgcttacttagcttaatagtccccattttgagtactactgagaaagtacacaaatagagctctgaatttatagcaatgatctgaccacagccctatgccataaattcatatttacaatctgaccacaacactgagcagctacatgctcccaagggttggagaataattgcactatttaattatttttgagtcagttttgctctgtcccttatgagaagaccatctgttagactgtactgtactttgccctgtaccacatttccgaactaataaaatcagcgtcactcccattgtccctttccttgcaactcgatcttgtggcctgtgtgttttctataggtgtctgtagtgttttaactgctcagagagtggttctcccctttggtgtttcctcttatcttttatgttcactttgtttcccttaaagctgtcctactttattggtctggacagtaaagtcggagaggaggagatttgatgtggaaaaaccagagtgatcctccatcgacagggctcaggagtccatgagcagctagagcaggtctctcatccatcatcctgccacggagttccttgggctctttctttgtgtccccagtgcactcagctgtgatgaagtttttactgatcagaactgtagaaatgtctaataaatagttaaaggtaatagattttttaaattagggggctcagcttgtaagtaaggttttgcagttcttttaaacttcctcattttgtgatattattttgaaatattctgcagaacaagactttgaaaatgactttgtagaatctcaaaggcaccagctcctttaccccacccccacccccaaaaactgcaactaagaatatattccatatatcatatctggtagaactttgctttttaaaaattaattagaaaaacaattgcatttggaaaatgggtctaggcattcaagtacaacacaatcacatttgtgattttttttttggctaatacatcgaagatataaaagtgtcaaactactatgtataataacagtctaattatcttgcttcaaagggggtacatcattatattgcttgaacttgttatctgcctaccatccacctccttctttatgagtgatgtttaaacatgtctgatacattaaatgtttttggaaaacctggactagacttgaaagaatgttatgtcgatggagttttgatggttttgaaatatcgcttaaactgaatggctcaagatgtgcagtcatattaaatcaatgctgaaaagttacaactctaataaattgtatttatgctaatggttgagtctgatttactgcggccattaaaagtgaagaataggagcaatagtcttctcagaactgccattttccctattttctcttttattccttcacagctccacaaagtgtgccaactccctcaagagtccgcagcttaaatggatacagcattgaggtgacctgggatgaacctgttgtcagaggtgtaattgagaagtacattctgaaagcctatagtgaggacagcacccgtccaccccgcatgccctctgccagtgctgaatttgtcaatacaagcaacctcacaggtaaatgcaatcctttaacagagtagaccctattaacttcctttttgtttgcattttaaataaaaatcttctgcaaatgttttttagaaaaatgtattaaatatacatgtattttacctgattaaaaacaacacccatctaaagtagtggaagcctgcatctacctaggataaaaaggataattctacaatgcgcatgggctctcatggataattttattctaaggtagatattctctccatcccccaaagattacatcataggtggctatagccctttaacaccttatagacatcttttggaaatcctatgtataaatacttatttcacaaagcaaaaatttactctttgggactagccccagttcataccactattatttattgtaaaattgctgattaaacctaattatctcaaggtggaggagtcttagagccccagttagttggactggcaaatcagtgaatcgatttctcacagtgtggtgtgccatgaagaatgattataatgaaatatactcatacacaccactaacacatctcacactcaaattcatgcgtgtgtattaagagcatttttcagcttcatgaaatattaaagcacatttaaagggagagtttaatttaagcctttgataaaagggaagtaaatgtgtcaaatttgacagaaaaaaaacattttcctctatcaaaaaatcctataacgtgaaccatcagaatggacgttagaaaagccttaaatattttcccaacaaacctgttggtcaattccctcaagactttacttccttctttagacactttggaatgcacagcccaaatatactaccaacttttagcaaaagaaaaacaaattcacacccttcacttctttcctattttaccctccttatcaaagcccagcctgagtaagcccacagcttgccttttcacaggttgcatatggcagctacatgggctggaaaataccaagtagtttattgctaaaaatgctcaaccccactttcagatgagcactcagtaatgacaccaaccctactgtatttccagaatagctccttcccccattctcctcattaaatattttatatttttccaaactatacacgttacctccctttctcatcccactcagctgacagcgttctattttagattatattagacaccatagaaaaaacaatttattttataggatttctattactttcttactaccaaatgtacatattaattgcatttttctgcctgatggagttgttattaggggttggatgaatgaatgcatgctaaaacacataaaaccattttgatatacaggaggtgtgtgctatgctataattttattttcattattatttttaattttcacgctttttttcctttctgttttacaaagcttctcttatcctatcaaaaatagaaatcttcacaagtcctctggaccctgactctttctgtttcttcagagatattactgatagcttatcgtcctctcacttatatttttaacgcctctgtctgctgcagtagagtatggcccaaggaccagcattactagcttcacttgggaacttattactaatgcacattctcctgccctgcccaccccacacccgccaaatcagacactctgcagtgtggctcagcagtccttgttttaacaagcccccagatacatctgatgtatgccagcatttgagaaccactgactgggtggattcttcccagggtcattcaaactcttttatctcccattgttaaaaaccaacacactaacccaaaccaatcacaaaaatcttaattctgtccaaactcccagctattgctccctctctcctcctctcggccttcgtctagcatgaagtatctaagctcattttgtcctcacttaactggcttctgctcattactttcgtgacgagcaccaaaaactgccatgtttacataggcaaaaaacacttgacactctatgtcttcaccactcttcagcattctccacagtaactctttcatcatttctagaaatatttcttcacttctgtgacttttctgcttacctcctggttctccaggggccctgttctcagtgtcctttgctcacttcttctaaagtgtgacaaaatattgaagagtctcaggatttagaactgggccgtcttctctttctctttcatttttttctggcttgctccagaagccttattgactctcataacatcaaataccagatagatgctgctattgactcctaattgtacatcccacctagacatccaaatgcctgcatccaataggcgtttggacacaatgacatttccaactggatgtctctcaccttctacccataccaaacctcaactcttgcttctcctgcattctcatagatacctccagccacccagtcaatacaatttgagagttactctggacttttcacctccttcacacctcatatccacagttgtcattctatttttcaaaatatgtgttaaggtcatccatttctcctctaatctactggccagcccaaactactaccatctttttcctggacaactgcaatacttaccttcatctttttcatagccttttttttttttttctctccctggccgtgagtgtattctacagagcatccaacatcatgtccctctcctcaaaaactttctttcttttttttttaattatactttaagttctgggatacatgtgcagaatgtgcaggcttgttacataggtatacatgtgccagggtggcttgctgcccccatcaacccggcatctacattaggtatttctcctaatgctatctctcccctacacacaccctccaccgctcgacaggccccgatatgtgatgttcccctccctatgtccatgtgttctcattgttcaattcccacttatgagtgagaactcgcagtgtttggttttctgttcctgtgttagtttgctgagaatgatggcttctagcttcatccatgttcctgcacttcctctctcacaatcacactttgtctgggtctccccctacttccagggtttccaacaattaccgttgtaattaatataatttaaagaaatttgtatgtaaatccttaggagaattcctgacaatgatgatataataaatccctagcagtggaataactgcatcgaaggcttttaagacattgtatagtcttgaactttgaagtcagacattgatataaatctctgctatataccttccctgtggataagttccacatccttctggatcctaaagtcctaacctatgaaatgggagagtgatatttacctcagaagaatattgaaaatattaagtgatatgatattctagctctaaccctttttagctgtgtagcttggacaaatcaataaacctctgtttgctttaaaatccttctaggtaaataagaatgagatacaactacatgcctcccagggcagctgtggggattaaacgaattcatatgtatgtaaagcacatagcacagtgcttgacatgtggcatgcactgtatcaaagttacctacaggatatctgtaaagtgtgtaacattatgcttaatgcttggtaatttctcaagaaatggatagcaattattattattattattactattattatttaatgaagtctcactctgtcgcccaggctgtagtgcagtggcgcaatctctgctcactgcaagctccgcctcccaggtttacgccattctcttgcctcagcctccccagtagctgggactacagacctccacgcccgggtaattttttttgtatttttagtggagacagggtttcaccatgttagccaggatggtctcgatttcctgacctcgtgattcacccaccttggcctcccaaagtgctgggattacaggcgtgagccacagtgcccggccaggatagcaatttttacactgcccaaaaagctgtacaaattatgcttccaccagcaagcagaatgcaagattgtgcatttcattttatctagccaacaccaaggtttacacttgaaaaaaattgcaaatttaaaaggcaaaatatatcagaatattgttttagtttgtatttatgtgattactagagagattagttttttaatatttattgaccatttctacttcttttatgatgtgcctaggtaggtccattgttttttattttttattttattttatttttttattttttgagacagggtctcactctgtcacccaggttggagtgcagtggtgcaatctcagctcactgcaaactctgcctcctgagttcaagagattttcctgccttggcctcccaagtagctgggatttcaggtgtgcatcaccacgccagggtaacttttgtatttttagtagagatggagtttcaccatgttggccaggctggtctcgaactcctgacctcaggtgatccaccagccttggcctcccaaagttctgggattacaggcatgagccactgcacccagctgcattgctaatttttctattgaatgattcacattttctcattaaagtttttctctgcatatgaagaataatatacatgtttatctcatctaatgcaactcccccagttttgtcattttttaaaaaattttgatttgcatttttgtgtagagatttaaaaaatattttatgtagttaatataacacccttaaaatgttcaatattctatgtgtgattttttaaaaatatatattccccatttagggttgattattgtttatgttagatataccatattgataacatataatgcatattcctcaaaatagtaattctaaggttaggataagaacaaatcagaaactggatgcagggaggcttttcaaattaaatcagcctctcccaagattctgaaggataccttcttgaaggcgagatcccacagattgtaaaccaatgtagggcagtactggatgttactcaaaaggcatgtcatacatggtagtgatgtatagggagaagaaaatcagaaaactgttgagcaattgttatttatttttatatatcaaatttgtcacaaactaagggaagagttaactatgttaactatgcatgcagttttgtcaatttctctgagatttttttgtttgaattttttgagtttttattacttttacacttattatttatgttttaaccttcaaagtctcattgctttaggtacagtcatgcattgctaaaggatggatatgttctgagaaatgtgtcattaggagatttcatcaccttgcaatgtgcttacataaacctagatgacatagcctactccacacctaggctagatggtgtagcctattgttcctgggctgcaaacctgcacagcatgttactctattgaatagtgtagggaactataactcaatggtaagtatttgtgtatctaaacagatcaaaacacagaaaaggtatagtaaaaacactgcatggtaatcttatgggaccaccatcctatatgttgtctgttgttgaccaaaacattatgtagcacatgaccacatggcagcaacttggctaacatcctttaattcaacattgttttcttataagtttgatgagaaaattaaaaaaaaaaaaacaatccctagcaagggccactctctgcatggaattttcacattttccccatgtttttgtgggttttctctgggtactccagtttcctctcacatcccaaaggttttccccttacatgaattgagttgtctacgtgaccccagagtgagtgagtgcaggtgtgtatgagtatgccctgtgatggtatggtggcctgtccagggctgattcctaccttgagccctgagctgccaggatgggctccagccacccacaaccctaaagtggaataagcagattggaaaataaatgaatgagtaaatagaaatcattataaaataaaaattcataaagtctatgataatcatacagatgcacagcaataaacaattcagtatgacagggctcagcaagctgcccagtctgtgattgctggggtttgaacttcatgctggtaggcggtgctccttacaatgttcacttggaaagcatttattccttgatttatataccacaccactgtcactcactgattcaccaaaacttgagtaaatcattatttcgttttgattaatcttttgtaaatgcatgtatagcacacattcatttcaatgtttaatattagtagtctatagaaatttggtgatgttttgtgaccagaaatatgccataggatcttaattcttttttacatcaattagcctgtgggaaaattgggtttgttgtatatcatttcacttaaaagtgatagtttacaaaaaattccaatgacattaagtgaagacttctatatatctctgcagttttagttttatctttcacttgagattctctgtatttaagtacgggagtcactcattcatacttgtttttataattgatataattggtcttctctctgccatcatgttttatgctttccagttttattatttcttgttttttagtgattttttcactacatttcttgccaatgtgtactatgaattctttgattttttttctttcaaggagtttgcttctctcaatgctaaattgagtcatcaaggacataggtagaaggtaatcttaaagactaagaagaactccagtattgccaggtggacttttcattgtgaagactcaggataatgaggagggaatgtgaattgagagtcaccaaagccagcttggataattatcaaagtcagagaatttcccagtaaacaaaaggaatactaggaagtgagatggaaggagctgataaagcagagagccagaaagctggatttggtggagacgttaggggtgcagagattgttttgaggcagctgttttgccagttggttgagaaaccaaggtaccaaaagagagaaaaatcggtgaagcctatataaacagttttgctattgagcagttttgctactgatcttgaaaataacccttatttagcatttctgaggtgacttttgttgagattttaatatttaagttaattttggttgttagagtcatatttaaataaaataattctgacactgaatgtacaaggcaatttcgctttattagttagcgtagggttctttaccaattaagtttaaaaaatgctaatcagaaaatgtgctgttttatttcattaattttttgttgtataataagctcttttattcttcagatttgggtctttcttcagcttggaaaatttgccattgtgtttatgatcattacttctggtgagaaatagcaattttcaatattgtatatttcttcctaggttgtcttcctcattttagtagttcagaacacggcttgtagagtcaaatcaatctaaggtcaaattccgcctatgccactttttagctgtgtgatctcagacaaatttaaaaacatatccttacattggagtttcctcattcataaattggggatgaaaaccttatttatattatggaactgctataaagattaaaatgagttatgtaaaatattttgctcagaaacaggcacatagtgagtgttcaatgaattcatagttacctttataatctctgaattacagtttctgatttctgggttattgtcccataattgtttttatttccattttctgatttttgcactgttgattctgctctttgaaacttctaagatgatttttaattcttctagttcagtctttgatatgatctgcctttttcctcatctagcttgctttgatttctgcctgcctcttgaaattctcaatttttgtcttcatctcttgtttactgcttaccttctgtctcttacttagtggattccaagttattttagatctaattaatggcatgcaactcgtgatttttaaattttacaagtttcttgaattaaatcctccccagaatatgacaatcttccataatttgagggctatatccttatccttctttcaagttacaatttttccatcagctaaatgtcctcccccaaactcaactccatagtttagttggctcatctctaatataaccttctgactgggtgtttgcatgggaaaattaaactgttttcaaatcatcttactgggcatccagttgctgttaataaaagcctttgctaagatgatgacagggttagtggggtaagtttgcattagccgcgcagccaccctacagtttcagcttctttcttcccagtgtttggtagagtaggagtgctgagagcttgctggcattttgcttccagtttaagtttgggtttgcctaggactttccttctaacagtccattgtctctgcctggtctcgttttaggtatttataaaactttggtcgtttcactgggattcttacaaggtggtagttcaaaactatagctgtatactgagtcaactggggagctttaaaaaatatactgatggctgtgtgccccacatgcaaaatgtctgattaaattggcctggaatgtggcctggacatttgtacttttaaattatctcaggtaattctgctgtacagccagcacagggaaactctatttaaaggaggagtttgtcaccagtgatcacatttaaattttatccagatattcttataactttcatttccccactgaaactcaaaaatgttaggaaataaaaaactaaatgtatataaaaaataataagctattaaaagtaaatagaaaatactagcaaaggaatatcataagatgacaaaaattaagtgtaatagttattgggaagtgggattttatgttcagacttacaaaaagcagaaggtaaaagcaaagaaaattattaaaaatgaatatcaactaagataactgaagaaaacagaatagtgaagcagaatatttaccattcatgaatttgtctatcagaggattaaatgagataaatcccagttgcaatggagagtccaagggttaacaggcccgctcaggagcaaatgggcccctttgggccacagggtctagattctgtgccctcccaaggccaaggttcagagcaaggagttctttaaggttcattccctcagccagagcctcagggtagaaaacccttcagttatcactcctgtgtatctttagatttgttgaaagggctccaattaactctgggtagcttttgctgatttttcctgcagccctgttaacatgcaaagctgcagcccagagagacaggactggcgtttcccctcaaactgaggactgctcagaaactgacttcataatttgatttgaaattatttcaagaatgaatggattcaagacttcgcacatatacgaattattttttccgtaaggtgtttaaacatgtaaacttaattatcagcataattactacagcacctggcatcaagtgttacagatataattggtgtatacaaaatattttctcaattttattgttgcattacattgagctaaagtctaggggttatattgcttcttcaggtaaaatgataaataatagtaatatttcttactatttgctatagtttggcaaatgaatcaataatgataagaataatcttccagatgactcacatatatctacatttatgtaaagaaaaagacattttaatttataacacaaataataatatagcttttgccactaaaattgtttcagtctttacatacaatggacttaatttttttacctgaatgaagtgggtttcatactgaaaatctgcctctaatttttgcctcttttacatggctactgtaataattagtgactctcaattctactggtcataaggtgattctcagattacttataaaatgcagatttgggggtcactcacacatgattctgtacatctgggctagtatttagcaatttgcattttacctaatgctccaattgtatttttggaaggtttatgaaccacatattgaaagacactagtgtagaggagtggtcagcttagactggaatactttcacctgctaggcttgcaactatccctgctttattcctgcttctggttctgactgtgttagctttgctgccagaaaaatgccaaggcaagtgaagaaagagaggcagtgtcagtaggacccctgaaccccagtaggactcctgaacttctgaaaattcccagaagaaagaaagtaagaattggggatcttgataacatggattctgattcactaggtctgggaatatggtgttagattctgcatttccaaccagccccctcccactctgtcatgccccatatagaaaggcaaggagctcactatttatatgggaaatggaaaacaacaacaacaacaacaaagaaaaaacagtaaaataaaacaaaacccaattctcaattacaagatgccccttaggttcatataaaagtgagagcagtataattcaatgtaggaattatcattgcaatgtcttggtagagccttgcctgcatgcatttaagttacaaacattcaactacatattttggaaatgggtaagggatggaggaaaaagtaaaaaagcaaaaattaaacaaaacaaaaacctataaaaatagtgtcataggcaaaggatgctatccagtatggaaaatgtcaacatctgttagctggaaagaatgtttgaataattttagggtttcccagtcattgacaaagaagtgatactcattgtttgggtgtctacaaaaagaatgaagacttcagagccctgaagaatcattgatttctgaagagttagaggcatacacaaaaccaaatgtactatactttatgggccatataaagagttgtcaagggaactttaaatcacgttatttttgccttatgcctgattttggaacttaaactcagctatgcagagtatcatcagtaagattaaattaaattaaaatgctactctatatatgtatgtatatgtgtatgttatgtacgttcatatattatataaatatgctctctctctatatatgtattctctctatatatatgtaaccatacttacctgagaagtctgcagagaaatgactgtaattcaacgccgtgaaatttttttttctattcaactgaaagttcttactccatagttgctaaaactgcctatggtactctctgtgcacccatgctatttcttcaatagacaataagctcctggaggacaagtttcatgtttcatatttattttaagcctcgttcactaccttgctcaaggtaagtgattaatatacttatcttaaaagaatgaatgaaggaatctttcaattagcaaatgtagctttctgctactaaccccatagttaacctaatgttaatatttttttgtgctgagttggactgagtattgaactactagtccttactaaagtctcctcagtcttttatcaacagttctttaattttatagaagaatgcacagagctatcacaacttaaatgtatatttggaacttaatacacatttcccaatagaaaaaaaatatgttggtagggtaagactaataaataactaataaagactaattccaaaacttagacctcagaatagaacccaaccactacatatttgaaatgaaaaataatggaagccaatactgctgcaatgctgataattataaagaacagaaaatattcatttatttaaaaaagtgatctaccacgttccatgctagtgctaggccctatcattgtaacatgatttttataacactaaaatatagcccaagcactctctctgaagtataagattatgtagacaatgaaagttttatagggaaaacctaacagagatgggtttatcatttttaattcattatttcacttgagatactgagaacctaaaataatagcgatgaagtttttctctcactggtaataggtgtccacagtaagtcaatgcagaggcgggatgttcataggcgagacccacacacttcatctttttgctgtgtcatccttatggacaaggcttctacctcatagttcaagatgactgcttgagctcctgccatccagtctgattttcacccaacaggaagaaataatggttaaagaatactcacattcactttaaagacatattttagaagttgttcctccacctctggttatcttgcgtggccagaacttagtcacatggctgtacctagcttcagggaatgttgaaaaatgctgtctttattccaagtagccacttgcccaggtaaaaagtgtttttattttactgaggaaaaggagtataatacataataaggagcaattagtaatctttgccacaataggaaatcgtcagaagtaaataaaaagtaattctttttgttggtgttattaaagataaaagccagtttttatagtagaccataaattaatattccaatatttgtagtttattacgaacttttttttttaatttgagatggaatcttgctctgttgccgaggctggagtgcattggcaccatctcagctcactgcaacctgcgccgcccgggttcaagcaattctcctgtctcagcttcccaagtagctgggactacaggtgcatgccaacacatctgttttttgttttttgttttttttgtttttgtttttgttgttggtatttttagtagagatgggatttcactatattggtcaggctgatctcaaactcctgacctcaggtgatccacctgcttcagcctcccaaagtgctggcattacaggctacaaaatatttctttaaatgtaaatcttgaaagaaactggtctgaaaaaattcacaggacgaaaatatggcctatgacataaatagtaaaaatagaaatgatgtaatgttcctgcttagctaatgtagaaagatttcattaggtaatgcagtgttgatgagttaatagctttgtctaactctcctgaatacataatgtgcctgaactactggtacattgtgaaatcttcagagagagttgttttttaaaaaaaaaagtttttcattttattttatgcaataagaattgacaccaaaggatttgcatttctttttggtaacatgttgagccgtagttaaaaatgatgaaaatatataacttttgttctacagtgataatcaactaggcatgtccacaatgcttataaacattcaatacaaatacttcaaggttatcaatcatagttgataaagaagaagaatgcacagccagacttttctgttttctaccttttatgatcattttatatttgtgttatatttggaacaaattaaaagggttatatgtataataaacaaaggtccaatattgaacccaatctctctctctcacacacacacacacacacacaaatgcacacatagaatttcttataaatcagtcatttttgtaaaggaatattacaggcatacaaacttgctcattttggaggacaagacttctaatttctgtttgtaagcaataggtgtcagtaataaatttgaacctcttaacacattttaaggtgcattttaaataagatattttatagtaaaaagtgtgctattattgtttttaattaccatttttcaacacttttttcttgtttgtggaactggagcttaggtcaaatgggaggagtaatgatcttggggtcagaatacaggttctaatattggctctactgctttttagctgtctggacttgagcaccatacagtacactcactccaaaagcagcctcctctgtacaatggaataacaatatcagaggcttgtagcaggggaccttggacactgatcataagggatgactttcatttctctttcttttcttttcctcttgtctccttgcctgtctctctgcttagtcaggtccagtgttttcttgaagagtttcagtaatttcagtgtgagacctttatgtaaggtaaagagttaacacaagcacgtggcttcaaacttattggcaaattagaataaaaatggcaaagactctgtagttcttaccacaaaggcattgattaaaaatttgaggttagaggtaaacctgctgagagaatcttaactggataatactttgaggtcaattaaaatcactgtttaaaccgtcctctaagactgggattagaccacatattttataaagaaataaagaataatgtttttcctgtttgtaagaatcaacatctgcatagtctttgataggtatatgatattctatgctctctaccaaaagttttaaacaaggtcaaaaaacccatttgaaggaaattaaatgtaagaaaaattagttttgaagtttccaagggattaccttaggtttgggttaagtgtatttattgttccaccttttgggtaaaatgcaaattgactttccctttgtaaatattagaagtccttatttttattgaaaatattatccaaaaacaacaataacaaatcccaccctcctgggctaagaaccagaggagaagcatcctggatatgtttccagatctctattagatagttaagttttcatccatatttaacaaatgtcattattcagtttcatgggatcactgtgtcaaaatgtctgtgttagaactttattttcagaggttcctttaagtggtcaggaagcatggcatattggattgattactctctttaatccatccactgggttggtttgggatgtatacttaaaaattagattttatcagcactgcagcgggatcctcagccagaagtctcttcttctgccctccttcccctagccagttttcttttaaaaagtgggctcttccattatgtctccaggtagcagtagcagctctgcctgtgtggcatcccttaccagatggccctcttaataaatgtcttgctcttgcccaccctcactttcttgatccaaatgtgaaatgccagcaaataaataagagcattgtactctgatgagttctcttgagatgggggaaaaccctggggagaggaagctagaaacagcttttctgtttgctgtgactgctcctaattactggccagtagtagaagatatcatttagatgcagtagaatataaagataaagaaaaaaaaatgagagataaattctccatgttatcccaaatgcctttgctaacgtggaaatactcttggattgttggagtgcatttgaaatattgtgcatgatccttacaaggggacccctgactttggactcagggtagacagttgctgcatgcagatttcaccgccagactaaaagtgcaacggaaatgagtgggtgatgagagcagagcagccagttctttaattgaattaaaagctgggtgacatcaatgcagacacctgtccaattacagacaggccaaggtgtttaccattgctgtacaagcgattcgaagatgacagaaatctttccgcccacagattaacataatgaaggagaacagattacagtggatgccggccaaacaccttggttggcagctgggggtggggtgggggagggaggaggagtctgctgaagtatgtaagtagaaacggagtccttttttcttctctgaaatatgctcggctttaaaaaggatccattttgctttgtgtcttaggctcggtttccaggcagagcatttatacttgtctgcatttagtcagaggagttaatcataaaatttcaacgtgaaagcagactcctctgttgttttgctgcttctcagcatacggtgtcccattagaggtgcaaaagcttgcagagctggtgtcagctccacaatgattttgtcttaggtcgtcaggctgcctccaattattaatatttttctttggctcctttgaaacttgaggttacagcaaaggaaagagagtgttggagataataatgtatcagtcaaaagaaacaatgtctgtcactttgcttgttccctggaaggggcgtggtgggagtcaggctctcctatagtgagagaaatagccgagtggagctaacagtctgcaaaatcttaattttcagtcacccgtcaagtgctaacttttggtaaaccatactaatagctgctgggatagaggataaggaaagcagtaaaaggctatgccctctgtgttcaaggaattcccaaatcactgtgaaggacttctaagttgcaagttctctaggccaatgctcttcccctctgttaagtggaaaccctgagtgcacagagtttggagccatatgcagtaggcctcttaacctatctacggtgatgagtttccttcccttaaatcaagtccctgccccctgatctttcagcttgggctttctgcacccactgtggcccacaggacttcaattcaaagggaatctacttacttgacttcaaactcccttggtgtggcatgtcaggatttctcaatgttaggcattaatgcaaaatgcattatcgcttagcagtgagagttatggtcctgctggtgccaatgattttaatccggatacccacgctcctgtgtttcatgggatactaacacttttaagacatcaataatgcttactttatgcttattgaatgtttcttcagcttgccctcttccattacctagagggactagcaggtttcctgacatgattgggaccattttctgatttcacagagtttgtggctgaaaggcagtttgcgaggtcatctggcctgccttgtaatagggacactctcaaaaaaaaaaaaaaaaaaaagacttctctgggatgtgtcccaaacaaagagattcacaaccaaaccaattttaaagttctccctttcaggatatacttcttcagtataaaaaccccaagtgtcacaagtatcataaaaggcaactaccgcattttctatttttgggctttctgtctaggattcctttagatatgtcaattctctatttcccagtattctttttaatataataccaaaatatatatttaaattaaatttaggcttcctattatcttgaactggtaagtctgaatcttataaatgtcattgtctacttggcccgtatgcaaacattcttctttatgtatcaatctgttactgtaagaattcttctagttccaatattttcttatgttagaaaccttgtaaaaatcagttgtattctatagcaccttttccagacgcatatagcggaaacattgataaatgctttttgatgatgatatatcttcagagtaacactgtattttccagagagtacctaatctaagtagaaccctgacacttaaagcaaagccattaggataaccactcaatgatctcaaaggatatatccacaatctacatagtcttggagagaatgtgttactctctttctttggccatggcacaacttttcaacttgaatccatcctggtgaacactacttactgagaatcaaaggagataaaccacgtgtctccaacaataaaatgaccttgtcttgattccaagtgaatgaagaccacatatttgaccagccccttgcccttgcataacccttaatttttaacctgacaggaggagaaagcacagtgaaccattatagtgttcttcttcctgaagtaggtaattctaactgcctttaaggaaaattatcagttggtttgacaaactttgtctctgacacacagcatgatgaacaagattccctactggaaatagaaaagaaatggcactccagccttagaaaatgcagcacattttttgaaagtgtgatttacaagccatctaaaaccttccatctttgatccaaagttggcaagaaccaaaacatcagctttcttctttttctttctttttttttttttttcctttgttttctatttttcagctctcatttctcagggcttattattgtttcaccgggcttgaaatgggaaatgtgagcactttgataaatggcttgaaagatgatctagtttctctccagcatctttctttaagagtctcagggtttttctatgaaatacaatacaatttggtaaagatctctaccaaatcaaagctgaagaagcaagtttgctgagatgagcagtgcttgcttttaaggtccttaaaataaggagtggctaaaattaataaaagactctcactatacacatgttatacacaacgtaactcctttagtgaagacaagaaacattaaataaaacactaaagatcacttagtgagttgtgaactcaggatctggtttgatacaatccctctgaaagtctatagaatacccttccttataacttgatgtaacaattaaaatttcaacatttcactctagttatgatttggaaagaaatgtcttagtataaggaattttataaagccaggctgtaaaattgtacaatcatagagctgcttttatatttctcaatgataatacttcctgaatgtacaacacatcttcatgctaatgattgcagataaccaacctgtatatcagcattgtttctttttgggcatggtgttcctatgcctcagctgaagcatgctcatctatgaagggtgctgcttttcacatatgccccataggttaagtgatgataaagggaaactagcctcatattccaacatgcttttccttattgacattaggattaaaagtcttattctctgggggctgattcatttcttgttagcatggcgttatactaattcagccatgcaagtcatcttatttagaatcttacggtagtttccaacttggcaataggaaagacatggcaaatgccaaagatttgctaaagatagaatggctaaaacacattttatgatgataactttagttttgagcctggaatttgggtatcgtggtggaggcattacaaaatggaaaaatgaagcttacataattatttagaatgttgattcttggttggggcacgttgagtatgaaataccagtgggacatccaggtgtggttacatggcctgcagatagaaacccagaaccagggcttgggagagatgtgaagtctgtagatacaaatgtgatcactgaaagataaggcttaataagctagcaaaggcgagtgtttagaaaaagaaagaagcttgacaacaacccaatcttgagaaacaaaagctatttaagagactgtgagaggaacatgagtcagtaaaggaaacaaaggagttctcggtagtttaggagaacaactaaaaagttcaatgtcacagaaggaagttgagggaggataaggactgaggaagggctatttgatttggtatttaagggatcactgctgatctttaaaagatacaaagcgtcggccggccgggcacagtggctcacgcctgtaatcccagcactttgggaggccgaggcgggtggatcacgaggtcaggagatcgagaccatcctggctaacacggtgaaaccccatctctactaaaaatacaaaaaaattagccgggcgtggtggcgggcgcctgtagtcccagctactgtggaggctgaggcaggagaatggctccaacccgggaggcagagcttgcagtgagccgagatcgcaccacagcactccagcctgggcaactgagcgagactctgtctcaaaaaaaaaaaaaaaaaagaaagaaagaaagaaagaaagaaagaaagaaagaaagaaagaaaaagatacaaattgtctagtagcatgtagaggcagaaactgagttgcaatggtagcctaaattggaatggcatagctctgcactagagctcttgactggcaatactccatgtaagtattctaaagtcctgaacttgttcagtcttaatactaaccctttgaggtaagtactatattatccccatctcacatgtgaggcctgcaaggcctttccttcaagaccgagattattattatctgtttacagactaggaaactaaggcacagaagtctgaacaacttgcccatgtacatatggccaatcggcagcagatttggcatttggagccagcaatctggcttgagcatgggtgcccatttccccactactccattatgaagatgtgcatgtgataatgttagcttgcttttaagccatttggtggaaggagaaataacttcttaaaagaaagtaaactcagaacgtaggtcatgatctgggagatttaacaggaaatgacaatcgcaggggcaggaatgagagaaagcaggaggttctgacacgagagggttttgaaattagagagagctgaatttggcatgagatggtcacacatgtgtgtatattagttcgttggcttgctgtcttctttggccatgagctaagatgacggtgccaagtggatgaatattttcatgtagaagcatggcagacaggattcagtagcccacggagatgcctgggtcgttgctggaatgaagacttagagacagccctaggaactaagggcaagtgggaggtgtcaaagcaaagaactggtctttgctccatcctggcttgttgatcttttaattctttaaattttctactggggagggaaattatggaaacatgtatattaaaatttgtgtttgaatgatgaaagctgtcatcaaaattggcaccttaaagcaataatgtattctctgagcgattgaaggtttcatcaataaagagacaccacgagtggggccatctttttataaaaatagtcataatctatgtggttaggattaaagattgctctgaaaaacgtctttgcggaaaaacagtggtgagcaaaagcacaagttatattttggattttttttaattcacaggattaactaaataaggagtctctgccttgcttatgaacactagtaaacaaaatgtgttttcatttctacacatacttttaattgctgaacaaatctcatatatctaccagcaagccatgttaattcaatacttccacgtgtaacacttccgtttaagacaggtgtcttaattaaataaactaataattttgcaagtagaagtacaaaagcataattatctaatttgctaattgttcaactatgttaatttgcatacttgttagctacaacataaacaaatggtttgtatatgtatcgcctactgttaaaataatgaagccactcttgggagtagcatttttaaagtgtgttaataggtgccctataaaaaggactccttagttaaatacggttgaaaaatgctaggttaaagaaaattaaatagttttgtttctgcaggaggtctaggatcctggaatgagataatatatatcttagctattggaaacattgtgctctgcctcacgaactatatgtggaaccccctccccattttaatgggagaaacatcagatgctgtttgagagctgttttaacaataagttggtctcacaattttttctcatgagtccttccattcaacaatcagcagaaagggaggaaaatgactgaaagaggaatatgtttttgatttctgtctctggtctctttgtttttgtctctctctcttatagacacacacacagatatacacacaatgctctttattgatgcttatggtaaacacgcaaccctcttttgtccctttttattataggcatattgacaggcttgctacccttcaaaaactatgcagtaaccctaactgcttgcactttggctggctgtactgagagctcacatgcattgaacatctctactccacaagaaggtaaagtaatttcaaaggtcttgacttccacatttcagtcatgaataataaaataggagaagagctaaatgctacaaggccatttgctggcaaaccccaacctaatttgatgacaaagtgcattgccaggccataattgctccattttttgggggggtgcgaaaatgaatcaaactccataccctttaatgacatgcatctttaatagctgtaatgcagattaatgggctttttaattgctgttacattgttcatgcaagagccttgtcattaatatgaagcatctgaaagattaatgaaagcttcctcattttactatggctcagaagtaaatctagagacagtctgactaaaaagaattgattgtatggcacagtatgaaattgagaatcaaacggttgatttccatggtcttttttaactgctaaacagcagcacaggcaacaattatttcagtatgatgaaacctccaaatgccaattgaggcattattaatcactgcttagttccttccaacttaagtctcacttctgttgtacttggaacttacaaactgttggcataaattaaggtttcagaaagcatatgttaagaaggcagtgagaaagagaaaatattttagcacgccaaagtgaaagctttgctcaagcatcagaatgcatcacttcaagaaataacagctctcaaaacatttgaagcattgttacttcatatttctctattctggataagaggaattgtacatatcttatactgtctagttgaaaagttctttaggagatttaaacgcttgatctttagggaaaaagagtcagccagtctttctctctctctctttcccagtatctatatattccccccttcctcttttaaaccctttaccaagcaccacttgcactgaagatatgtaacagaaaggaagacatggacccataggatgaaaccaggacaggataaatgactttgtaaaatccttcttgtgacccttaatatgctgtattttttacctaaaccaatcagactcccctcacctgaactatgctgtcagtgacccagcctcagcattttctccatctggtctactggtaatagcactgtttttgttgtatcattgcatctgctgaggacatgattatcatcccctcttacaaggactttgaccagcctcaatatgggacaaatggccctatgttgcattattttctccgtatccactaaatcctttgtccagggtttacctggtacccttcataccaatttcaagctaagccccagagagatccctgctcttgtttatatttccttttttatttttaaagacattcccaaacttctaaatatccacgaagtaattctgaatttactaaatgatagaggagtttaggaaaatttaaaaaaaatgtttagttcttaggaccccccaattcattgacaactatataaaatacacagctctttttaaaaaaatatgcactaaagttttcatatgtaattgactaatttggttatgcgagctctggcaattcttatcattacatataggtttttaaaaatttatattatgaaccacattcaccagcattactcatctcagatcacaagctccttgaggctaggggactctatctgcttaatttgctttaataggtacagtcccacatagagattatgggttaatagtacttttggtggagtaacacaagcatcagtcaagtgaactagtgtaagtactcctcatccatcattgacacaaattctcataaatgtgggacagttatttaacactgttcctaaagcaattactgacaagctgcccacgaatcgggaatatttccatgcatgggatttcaggtttattccatgatttattggtttgggtctgaaaagtttgaattagaaaagtaaactaaaattagactctataaatcttttcttccacagccccacaagaggttcagccaccagtagccaaatcccttcccagttctttgctgctctcctggaacccacccaaaaaggcaaatggtattataactcagtactgtttatacatggatgggaggctgatctattcaggcagtgaggagaactacatagtcacaggtaagacctctagagttatcagcgaattgttatagtctatattcaaatataaacatacatatagttggctctcgatatccaggggttccatatctgcaaatttaatcaagaatgcttaggaaatatgtgaaaaaaataacaacagaacaattaaaaataatataaattctaaaaacatagtataacaactatttacatagcatttacattgtattaggtattctaaggaatctagagatgatttaaagcatacaggaggatgtggatagcctatatgcaaataatacaccacattgtaacagggacttgagcatccatgaattttggtatcagtagagggtcctggaaccaatctctcactgatattgaggagtgactgcacacacacacacacacacacacacacacacacacacacacacaccagataaatagagtctatagttatctgaaaatgtgtttttgaaattgggttgcttatttttatctcctgttaatcactccaattgtatgatcttgaaggtcatattagattcatggtgaaactgaagctaaaaaaatatggaaaagtgctcatgttacctccctccacccagggctgtcctactgtgtgttctcttctatagagcccaccaccccttacctaaatccttctagcaattacctttgctcagatgcagaggaggcctggaaatgcacaaatgtgctaagcacaaagagctcagcacatgacttctctgacttcagcagaccacaaggattgaaattgggagccagtgttttcccagtcaggctcacagtgtccagttggatcaatgacatcatcaaataaatgcctctctcacatgagctattagagtggtgcaaaagtagttgtggtttttgccattgacagtaattacttctgtaccacacgaatactttaaaatcctcactaatgtgtaatagtcttaagactcagaagtgtgactcagtgtggtttgaattttagatcttagaggaaacatagtatatctgcccatatcatattataaagtgtgatgatactgaaattaaatgaagtaaattcttgaaaaactttctaaatacagaagacttgcattatgtatgctgcctgtactgtgtttatatttgtattatacttatagtggttttgtatttcatattattttatatactgtatgtgactctcatgtgagacattattaatcaaatgttgactgatgaaaaaaccaaggcctagagatattaacttcttcataaaggtcataacaagttagagtcagaggtaggatgaattatttatgtattcactcactcacattaatgccaggtactaaggttgtaatagggaactggccagatactgtccctcttctcttggtgctcacagcttcatgggggcacatgtagatgctggagcaagtcgtgtggacagggctgtgtattcatccagttgcattctcaggtttacatttttttggcccccctctagtctgagaaccttaaaaggacaagaacaattacttttatattttattattcataattggatagaattccataatatttattctacaacataggtattattttacaccccaattttacaagtgaagaaactgagggaaagaaggattaagtaacccaaggtcacacagcttgagtcggaggctttggtactaacccaagcattccggctgtgttgaagaatgtggtcttaaaaacaagtgttttaacttgtcttagtttctgaatttgtaaaatggtgttaattacattttccagtattttaaagagaattagaactatatataaaatataacatgtcattagcaattggtaaagagaagttataattgttatctcctgtacaacacagagttcattgtaaaaactgaataggttaatcttactccaacagtatcttatggcatgattttaactaaaaattataaaccacagaagttatttcagaaaaaattaaatcacaccatggaaggaactttacatatattacatctttgaacctttacatatattacatttttacatatattacatctttgatgtaacatattaataattaacatacaaagcacttctgtgaccaagaggtaacattgcatgtaatgggatatcataacttttagaaccagaatagacatgtcctctgagaatccttttgctccccacgtgtgacacaggtatgccccgtatgcttactgattacctttatattacatcgctgctttttgtttgtgtcatcttgaataggactgtttgtttgttcatcggtttgccctgctgaaccataatgatcattaaggacacaactatatttgtttttttcattactgcatctcttggacctatcacagagtgggaatggaataaaaagtgttagagtgaaagaatgaagtcagatgattcctgggaataaaaacaagaagatagcaaaggggaactgatggaggataggattagggtaggaataaggcaatagagaagagagaaaaatggaaaagatacagccaggggaagagaaactaagaccccttccatgcgcctaaacgaaagctgcatcagtccacagggaagtggtgcagctaatggcaggtctcaaactgtgggccttgactctttccaaaatgtacagaactccatatgaggttacactggacaaaaccggaaaaagggcagtgtagggagaggaggaagaattcacatcaatttctaataccacctgcaaaatgacactgaattctgtattttgtttgtttgaattatcaagaacgccatgtgactataggccctgaagaaagattgtggtaaatggcaccatagtgtattattacaatagaagccccaaatataaagaaagtgaaatatttttaaagtgcctacatccatggtaatagattgattcttcaatggttttctatctttatgtaatattttaaagaatatatctccaatactacccatagcatttttttttctgctgtagctttcttggcatttcataagcaactatgttccttgttgctttcatctccaaatagtttaagatatgaagcatattgggactgcaatgctggtcaaggaggggaaataaactgagaaagttaatatggggttcaaagatgcacatgattattctaactttatagctagaaaaactgagacctagatgggttaagaaactctagtcagtaatcagaggaactaattcaaatgtagatctgtctggccccaaatcctctgcttttaatttctatacattctgcttgttgctcatattttattttcccttgccagaactctaaaagaaagaccccagaacacctgtattagtctgctagggctgccatgtcaaaataacaaaactgggtgactttaatagaaaagtatttctcacagtctggaggctgaaagtccgagaccaagatgttggcaagcttgatttgtcctgagtctctttccgtggcttgcagatagtggcctcctcactgtaggtgcacatggactttctttcaggtgacttcatccttggtattttttcctcttcctctgaggatgccagtcctattggatgaggttcccactcttacgaccacagattttatatcagtgatatggactaagttcaggtcatttatatttttaaagtttagctatctacagagactctcagagaagactaaataggaaagggactctgtctgtctgaagtcagcaagggagaaggctgtggagaaactgatctagccattgggatgggctttagcttctatgggcagtttaagtctacaccataacatgtatctatctacaatgctattggtacttactgcttgtctttgtgtcagggtatttgtgacatagtatcttttccacactgagtggcttgtgggtagaacttctattcatgatgtctggtgatttcaataatagtgtcagtttaggtctactaaagtggatctgtatagagctgaaatatctcttcatagagaaaccgagaagtggaatacagagtttactagatagggaaaataattgataatatctttaattataaaagtgataaattcttacagaagataatttaaaacatgcagacaagtaatacctgagaatcctgtcatattgaaactcataatatttgatggaattccttctactactttattcatgttaacaaaattgagctataacctatgtatgatattgaatacatattcccttattatattatgactatatcctatcattaaacatttttgtaaaaatattttgaaatgttttgaataacattatattccatctcatatagcatataatggatatttattaatgcatttaaccatttgagcaatagtatctaatctatctctattttaaatatcttgacatagatattcttatacataaatctttatttgctaggttcctagaagaatagctaaatcaaaggtaatgaacatttgcagaatgtttggtatagtttgtcacattattccaggaaagttgtcagcagtgaattttatattcttaaatatttgattattttacaaaaaaaaaagttattttattttaatttgcattttaaagtactagttatagtgaatacttttctgaataattattaaccttttatattttcctttcattcatctaatcacattcttgatgagcaaaaatttaattggggtaaggaataattttgagacttctccacgagctatcctgttttttctggttacaatcacccacactgtttaaaatgttttaccctctacaatatcagaaacttccctactaacttggtttaatgtcccctcctaaatattcaaagtgtcaacaatttttttctcactcctacttcatttacttgtagtttccctttaggtttccatatagaatcgacattcttcccgtagggtttgccagtggatcttgctgccatggggggcacaagcaaagtaaatgcatttcaattcagaagccacttagcatccaggtggcttggatttttttttcttctttttcttaaatatgaagcattaaaagtcaaaggcattgctgcaccttgagttagtacaaaatttattttaaaatgcatacagttcaaattttttaccttgcataggccataagctagtagtatggtgggtcagttctgacactgaaaaatgaatccagttagagaacctcccgaaggctgttgatgtttgctataataaatagcacacactttaagtcaaactttttcattctgtattcaaaggtaatggatttttcgtaaccatagtaaccttggtgtattctggataaatacgtgaggtatatacattctagttttatttttgaatataaactaccacattatgtattactaataatatgaaaaataggatgtaggttagtataatgacagcttaaactagtatgcattttccttctgcaaaaaataaatatttatcaaaagtataggttcaattaatttttctcccagttttgtggtattctggtggtgccatttatctttttttccaagatctccattaatctcttatttctgtcccataacagatttttaagaattttgaggtaaaaacaattgtactttaaagcttatgattaaaaacataatcgaaagattgaaggacctatattgatatcactagcagagctattgtgggccacttaagatgtgtgtatacagtacattcccaaacaagtagacaaaagaaatccttcatgagactgttcaacataccaggattgtttcaaagttcaggctggacagcacctgatcgatgatgactatccagactgtagccacagattattcttattttaaacgagcaccctaccagaaactggccgtttttaagaagtttataagatgtttccaaaaagcctacaaactttttagaaacaaaaatagcaagatggtgctaatcaggacaagtctccaccaaacccggcaaggaggtttatgcgagttgtgcttcctagttagaaaatactacctgaattgcttttggttaagccaacctaagccattgctgtggataatgactagaactccaaaagaggaaaggttaatagggacattatagaaaaataacaactatctcacaccaagccataacacgtgtgttttcaaatgtatcatctgataaatctacatagtcatcttatagttaaataagagtgactgatatctagaaccatagatagtgtcttcccactgctgttccatcaggacctggatttctatcactaagactgaggcagtaagatatagataatagcaatgtaatgagtgtgtgcatgcgtgtgtgtgtgtgtgtgtgtgtgtgtgtgtgtgtgtaattgagagacagaaaaataaagagagggtagaaaggcagatgtgggcagggggaaagagggaggaaaagtggatgaattctggtaaaatcatataggcaataattatttatgtctaaccaactaaaagtgctaaaactttttttttggtcttatttgccaaggtcaaagagaactatgtgtaaatagcaaaatagaaatgctcatcttaaactttccaaacacttaagtcttacgatgggaaatttattgacgaagaagctgtattgcttatggcacaataaaaacacatttaaaggttaggcacttctatccgagcgttataaggaaccttatcagcactctacaaatttgagctaaattatactcattcacaccaatggcttacagaagctcttttcttagcaaaatagaattttactttaacctagatattttctttattttgcatatttaaatatcacattgcagtacattgaaataactcctcttacataaaaatactattacctaaaggaatgctgttaacacgcctgtgttctgttacaagctctaatattaataaagcagagcatgtgaggatttccaggtaagatgacggtctcatccatgagtcaccatgccactctattacaaacgaggtcataccatgtttccctttgatgtctcagtcatatagtattaaattgtacaaagtctgagaaactttaaggacacgaaggaacaaaagtcaagctatgcaataagtagagccttcaaagccaaattactaagctactaactctgtgaccagagactccagaatagttgttcaaggttgttctatataccagatctttgggttaatgaacagtggatgctatactctcaagagtcttattcatcgagcaacaaagggtcaaatgaaatgaaataacttgtacagaatgtttgaatatcagttgtggttagctgtaaacaatacaacctaagtgtcgttcttccattaaggtgcttctataatgcacccgtatgtgaagaaataaaatatgtttaaatttacattttaagacccgtacccaaatattatatgatctgttaacctaattaaggaatattatgttcgtaaatgatagggaaagattctatgcttaaagggattttagaagaatcatgggaataatattcagttagaaaagcaatggagttaaatgctggaaagataacggaatatgtccttcagttgaaagtgttacaaatagaggtgtcctgttattttcagcattttgagagttgctatgattttttatgtacgttttaaagtgcttaaattgagttataaattaatacagaaaagtggacacatcttaagggtacagcttgatggatatttacaaaggaaacacatctatggaatctgtacccaaaacaagaaacagaacattgtcagcaccctgtaaagctcctcattttgtggcctcaaatcttgactcaggtgattgctttcctgagtgttgacaccataaactgattttgctaattttgtactcaatataaatagaataagaaagtggagggggggtcttcaaaaagcttatggaaaatgcatattatgaaaaatgtgaggatttcaattttttccaccaaaataaactcatactaacttgttataacattcctgaaccagatctagtttgaggtggtaagaaagttaagacatcagtctgaaacaagcccctaccagggcaacatgaattcagtaaaattgaagcaaggacaaatatcaaatttctggtgaagcttgcatagaagaatagtgaaatcattgatgttttacaaaaagtttttgaggacaatgccccaaagagatcggcagtttacaagtggataactcattttccttaaaggacaaggaacaagacagtattaaagatgaagcctgcagtggcagaccatccacatcaatttagaagggaaaatattcattttgtctgtttcctaattgaggaagacaaacaattaacaaccaacatcatacacatctcaattggttcactttgtacaattctgactgaaaaattaaagttgaggacattaaacttagcaagctaacataggaacggaaaaccaaataccacatgttctcacttataagtgagagctaaatgatgagactcatggacacatagaggggaactacacatactggggcttttcagaggtggagggtagcaggagggagaggattaggaaaaaaaaaaaactaatgggtactagacttaatacctgggtgatgaaataatctgtacaccaaacccccatgacacaaggttacctatgtaacaagcctgcccttgtacccctaaacttaaaataaaagttaaaaaaaagttgagtgaactttctacttagtgggtgccaaaactgttgcacccagatcagctacagacaagagcagagctttcaatggaaattttaaacaggtggaatcaatatcctgaaacattttatcaaataattgtaataggagttgaaatatggctttaccagtacaatcctgaaaacaaagaacaatcaaagcaatggctactaagaggtggaagtggttcactcaaagcaaaagtggaccagtcaagagcaaaggtcatggcaaaagttttttggggatgcttgaggcattttgcttgttggttttctggaggaccaaaaaacaataacatctgctaatgatgacagtgttttgagaatgttagccaaagctttagcattaaaatgcccaggacagcttcactagagtccttcttcaccatgatgatgcccctgctcattcctctcattgaacatgagaaattgtatgacagttttcacggaaaatcattaggatcttacagttctgatttggttccttctgacttcttttcgtttcctaatcttaaaaaaatctttaaggagcacccatttttcttcagttaataatgtaaaaaagactgcattgacatggttaaattcccagaacagtcagttattcagagatggactaagtggctggtatcatcacttacaaaaatgtcttgaccttgattgagcttatgttgagaaacaaaggttatatttttattttttaattccattttccatgaaatttttgtagttcccttatatgttctcttttgtcactgtctttttcttagagatataggagggagagtaaatcagtacaacaattttttgtgttcctgtacctacattcagaaccctctgatctacaggcaattgctaagatgttgttagttgttaaattcctgtcttccagaaagccattggaaaatttgcaaactgaaacatctacctctttctccaagttcagatctagaaaataattatagaaatgcttcatctgtgcaattagaatttagcacatgaagtcactgacccgtgtacactagcaacaaacaaaccatataaaccattctgagtttccaacaatgtaatgttgtgtgaccataaagtttatgatgctgtagaaaaatatttaatttggaaagataataacaacaaatattttacacatatttgagtctaattcgttaaaatatatgtgtatatacatagatacatatacatggatgtgtacatatacatatataggtatgtccccatatggacatataccaaaatactaatagtgattatctcttaataatgggagtctggtattgcttttttttcttttccttgagagtcgttcaatcttttaaattctctacagtttggatattagaagtcagattctttttgtaatgttattcccaattttaatatatgtgataaaattgatagaaaggaaagaaatttcgggaacctgactacacttaaccattaatacttatctctagttttccctagtcttcaccttatatttaatcaggttgatcgtcttactaatttccttctagccaataccatagatgacctctagcactatctaccaccatcaaaacgttatgtatatttgatgatctacctcaattcccacatcttcatttgactcatagactcttccatatcaaattcctacacatttgtcatttggacacattctatcttgcaatattgacttattttcaaaggagtaaatcttgattaaaaataagaatgtaagtgcattggttacagttattatgccattatttattttcaaaatttctgtaatatctcacataggaataaggacccaactggcatccaacaaactcactgaattgagtttaaatgaattaagttgaaaaaacactgagactcagtaaattaatattttagagaaaataacaataaataccaatgcataatttggatataattaacatgctaaacttggtaaacaattttattgaggtaggctttcctgtagcttaggatttttcatttaatcatccaatatatagcaaatatatacaaatatttgttgctcaattatgtgttttagcttgctaagactattgtaacaaagtaacacaaactagatggcttaaacaacagaaattgactgtctcacacttctagagacagggagtcccagatcaagatattggcaagactggtttcttctgaaggctatgaggaggaatctgtttcatccctctctccttgttttggttgtttgctggcgatatttggcatttcttgattgtatatgaatcatcccaatctctgccatcatcttcacataatgttttccctgtgtgcttatctgtgtacaaatttctcctttttataaggacactagtcatattggatttgggcccaccttgttgagctcatctgagctaattacaactgcagttctagaggctaggacttcaacatatgaattttggggagaacacaattcaacgtgtaactctagtgctgtgcatttgatgctgtgattaataacattctaaaactttcctgaaatacctaaaacatattagagaatttaaggtgtgtgttcacaatcagttttaagatggatatggcccatgacagtaatgaaaatatttagaaaaggtgataatcaattccatctggaatgctcccagccttactttttgcatcttcacaatcacatctcttacttccctggcttgctttctttgattctttataggagtgattagtttcctagtgctgcttaatacaatacccaaaatgggatgccttaacacaatagaaatgtattctcttgaagtttgagaggctagaagtttgaaatgaaggtatcagtaggcccattgtctctctgaaaactgtaggggagaatccttccttgcctatcccgccctccagtggtttctggcagtcagtggtattctgacagtcagtggtttctggcaggtgtctgtcagtcagtggtatcctggcagtcagtggcttgcagttgcgtcaccccaatctctgcttgtatcattacatagtgttttcccttcttctaaagttctctcctcctctaaggataacagtcatattcaatttagggctccccgtctttcagtatgacctcaacttaacttcatgacatctgcaaataccttattttcaaatgaggtgacattcacatgtacagggagttaaaacatggagataccttttgggaggacaaaattcaatccactacacctccattgactccacaactactttgccactcagttgaaactgttctcacctagattgtcaatgttctggtagtctccaattcagggacagagtggaggttgtataattcatgatgttttattgatgattcctccatctcagaacattcttctcttggtgtctgtgatacctcaccttctcaattttccctattactgttcaagctctggtgtgatctcttcctcattttcttccacgcacaaatgttggtttcccccaggattcctcttgaaacattccacacaatctccctttgaaaactcagtagtccttgtcttcagatatttttcctaagccatgaacatttttctcactgcatattgggcactcctgctacaagtgtttttactccaactccttaaaactgaatttattttatctgccacatcctaccaatgtgctcttttttctgagttttttatctttgggaaaagtaacactattcattctttttcccaaacaaaaacccagcattaatctttgattactcctccttcatccttcacatccaaacttttttgctgttcttgttttaagacagggtcttcctgtgtcacccaggctggatggagtgcagtggcgcattcacagctcactgcagcctcgacctcttgggctcaaatgatcctcttgcctcccgagtagctggggccacaggtgcatgccactacacctggctaatttttgtagagatgaggtttcaccatgttgcccaggctggtcttgaactcctgagctcaagagatctgcacatccagtcttaaaatccaaactgctgttgccctattacacttatcacctggctcctatctactttcttagccttatatcattcttttattctcatttatttctacaacactacattggttttctatttctgttggtttgttttgtgaaataccacatgccttttcctacatgcagacttttgaactttctgttcactctgactggaatttactttccccagttctttacatggctgaatcattgtcttccttgagttctcagatcttataaaaccttctctatatttgttagaataacctagatgttataagcatacacacatatacatacagagagatgatagtttttaatagtgaaaacacaataaaagtttatttcttgttcacttagcattgagtgcatacaaagtttggtccacagagtttcctttttctgcacagtcattcaggaatgcaggcagatgcagattcagattctgtcttatttaacacatgacttccaagggagctctggagttatttccattgctacagcagatgaggaagaagattgagagatcatcatggcagattgttatgggccaggcctgggagtgaaggtattaaagcaataccttgtactaactcaaagttctgtaaatcagaaatttgggtggatttaattgggttcgtaattagggctttacaaggccaaaatcaagagttggggcagtttgggctctcatctgaaggctctgggaaataattcacttctagactcattcaggttgctggctgaattcagtttcttgcagtggtaaggccaaggtccctgtttccatgttgcctgtcagtcatgagctgctatcagcttctaggggccacctcaggtcctttcacatggctccctccatctcaatgatggaggatatccagtccccctcatgcttcaaatctctctgacttttgcctccagctggagaaaacactctgctttaaattgctcgtagttagtttgcacccaccaggattcatttccttttctccatataaggtaagataatcataagtgtgatatctcatgaaattcacagattccacccacactcaaagggggaaaattgtatataggtgtgtgtcactgggagtcattcttagaattcttcctaccacaggttcagaagcagaatcactcaagcatggttcttaccctgtgaccttactaagccttggtttcctggtagaatggtaacaacagtacctactttagggatttagtataaaaattaaatgtgatagtgcatataaaaagattagcataggtcccataactcttctaaaaatggtaaataatcaacaacccatgctattagtcgcagaaataaggaaattattgttatatcatcataaatattcttaatgcaaaacatcctctgcatgcaaaaaaaaagcatgtctctaaacttcatgttcaatttaactcagaaaatatttgttgagcaggtactatgtacctcagaggttagaagttatttataaaactaagatactgtcattcttcctcaaatcattcccagttcaattgcttagacagaaatacataaaactaaatagaatgctgtccaacctgtggtaaattctgtaacatgtgtgacaacaaaagagaagggttcaacccagtgtggaagataaagtgtcacagaagaatgttcacaggctttagagtcgagtttaagaactgaggaacaggcaaacataaggaccatggttgcgtagtcactagacacagaactattaatgcgcatttcacaaaaattaaagagggaagagtttaatatgagtgtgcaccctgggtaagtaatcaatagtgagaagcaaggtgggattgagattatcaaaggtgctaagttatgttgagatatttgaactttgttctgaagcaagagagaaccattgaaggattttcagaaataccacaagacaatcagtgctttagaaaacacatagttggaacatatcattgcttcaacatagcgaagactgagtctgtgtagctgttttctccatttagcaggcataaggacaagtgggttagaacactaaatgcaagaagctaattggacttaacaatacagatggcaaaaggatgaggagaggagagaaacgcattatgtttatttgttaacagctctattgtattgtatttatatgcattagtcagtgtaaaataaaatctgcttattttaaatccttttaaatagtgtttaaatatttcctgatgacacaatctgctaaagtatttacccttggtgcagatttccattaaccttgctgtagatactaagcctacaaccatatatttatagggggctcaattatggggtaaagcctagtgacatcattataaaagcacatctggataagctttagggtctttgtctttctatctgatttaggaaatttagtaaactgtaggagaataccattattaacagcccctgaattctcagattatgaggatgtcctttctctcaaaataaaggaagagagggattaaaatctctaaagctgtaaatgatatagagaaatgcccagtacacagatatcagggatattaggggaatccagttgtgttggatatacaagaagaaaaaaaaggcagaaattaaattcaaagtattctttcctcatgtcttttgtcagtttttttttattgttttttagagagtctatataaatcctttggttccctaaaggacaaaattcctttgataattttacaaattcttttctaaatagtatctctgtattgtagattaaaaaaattaatacctaggaaaggtcaggtcacttctttcagtcaaggaatgactcattcatgaaactggaaagaaaacttctttttcactcaccccaatacttgatagctatcttaaattgaatatgtctttaacagtatatttgatattatcagtgtattttgatttatatatatatatcgtatatattatatatctgtgatatatatctatatatcatttatatatctgtgatatatatctatatatcatttatatatctgtgatatatatctatatatcatttatatatctgtgatatatatctatatatcatttatatatctgtgatatatatctatatatcatatatattatatgtctgtgatatatatctatatatcatatatattatatgtctgtgatatatatctatatatcatatatatatctgtgatgtatatctatatatcatatatattatatatctgtgatgtatatctatatatcatatatattatatatctgtgatatatatctatatatcttatatattatatatctgtgatacatatctatatatcatatatattatatatctgtgatgtatatctatatatcatatataatatatgtgtgatgtagatctatatatcatatatattatatatctgttatgtatatctatatatcatatatattatatatctgttatgtatatcatatataccatatattatatatctgtgatgtatatcatatatatcatatattatatatctgtgatatatcatatataccatatattatatatctgtgatatatatcatatatatcatatattatatatctatgatatatctatatctctctctatctatctatcacattttctttaaccattctatcagtgatgggcatttaggttgattccatgtctttgctatcatgaatagtgctgtgatgaacatttcttttgatttttattgtctgtgttaggacatcataacagggccctcctaataccattaacaacgcatcatgaccctggtaatggttttgtagctgaagtctagatagtttaagtgccctatcttattcatttgtacatattcaatatatataataactactattttctggacgttaagagaattgctgaaaatacagtggtaaactgcaatgaccctatatatcctggtttgtacactgttttatcttctgtttcagttaccttgcttaaatcttgtggctatatgacactaataaaagttaccaaatttgtaataaatagcatcacaaatatttcattgtgcttgagattgtttcaaaggttttgatttttctggctatacacacacatatgtaacataacataattaaaaatgtaatgaacatcactagactactagttaaacaagttatggctaataactaatatgtacacaaaatatgtggacacaatagaacaagcaaatctttatcaataggagaatatcttcaaagtgtatattgtaaagcacttgtgcagaaaagtatattctatattctgctaatgtttatttgtttggttatatgtatgtagactacatctggaggcatacatataaattcaataattgctaaattcctaggagaaaactgggtaatagtgacacaaaggtggagagagtcttaatttttatgtaaggtcttctgtacattttggctatcgtaccatgaatatatattaatgcattattcattcaaaattaagtacaatttaaaaataaaattactacaaaatggtaaattttaaatgttaaagaaaacttggaaaaatataaagaaaaattcaaattgtccacaattttatctaccagacacaatcactaattatattttggcttatgcatttaaagtctgtttttttattattaaagcacagatacaaacatataattgggaccagactgttttacaactttttaccactttataatatactaagcttattaccaaattgcttgctcagcattcttttatgtaacattttgtgtatgtgcattttaagttttttaaaattaataccacaaatgtgtttatgcattatttaaaatgatatattcttcttcctattttgtaaatgttttaatatatatgaaggatgctaaccatttgcatgcactctatatgacagttatttttttccgctttgtcttttgtatttttttactttgtttatggtggtttttaaattaagacatttttaaaacttgtagtcaattcaaatttagatatattttccagcatagtgtcttccttaaatagaaacacttagattttcttcacttcaagaatagataaatatttcctgagattttctttgataatttatactttcaaaaatattttcacatattccagcttctgtgaatatttttatttatttatttatttatttattcatttatttattgagacagggtctcactctgtcgcccaggctggtgtgtagtagaatgattttggctcactgcaaccccgcctcctgggttcaagccattctcctgccttagtctcctgagtagctgcgattacaggcatgcaccaccacacccagctaatttttgtacttttagtagagacagggtttcaccgtgttagcccggctggtctcgaactcctgacctcaagtattccgcccaccttggcttcccaaagtgctgagattacaggcatgagccactgcacccggccacttctgtgaatctttaaattacccaatgatgtgtataagggttcaaattttattcccattttctcagtgaagaaatagagattctgaaaactgatttgatatgcctgaaatcataaagttagttaatgtcatcgctaggactagaattttggtgcttacacaatgtgctgactcccaaatcgtaaatttctaccagatgtttaaagtaaaagaatgatgggaaatttcattaaactattaactatattcagtggtttcaaaatattaatacaacattgatatctttagtgcattatcaatgtattcttggagacaacatgtcaattaaattgtctcttattcaaatgttaacttcagtttttaaaatttaaagctagtctgctgattttcaataagagctgtctaatattgtgaactagtgaatttgaggagataaaagtggaaattataggtctgcagagtgtagcattgataaagagggggccatttcttccaagtcagtaaagaaaagtgatgaaacataaactggaatttttgtgattctactgttgcatgaccttataacacccctgttttaattaactacggacctgaaataataacgtatatttctaatccactcacaggaatggtaggtatattagttagctagggctgccatgacaaaatacaggctgagtggcttaaacaacaggaatgtattgtcttacagttctgggtgctagaagtccaaggcaaaggtttccataggttaggtttcctctgaggcctctctccttggcttacaaattgccgccttcttgcaatgttcttacgtggtcttttctttgtacacgcacaccctggtgtctttattcccatccaaattttctcttcttataagggcatctgtccgattgaattaaggctcatcataatggccttattttgacttaattacctctttaaagaccacatccccaaatatggttacattctgaagattagaatgtcaatttatgaattttggacggacaaaattcagcctatagcagagggtctgctttgcaatgattatgcactattactcaccaaggtagtaaaaattaagcaaacatttatatacacaagtttttgaggggataaagcctacagaatataagaacaaaatattttcaagaatgcctgtctgtggttctttcattaattcacttcttcattcatctttattgagtacgataatgaggcagggaaaatataaccatctgactatgaattgacctggtgcttgtagacatatgtggtttaacagttttccactttgtgtacccctctctcataacatgtagcatactctgctagaattattgattgattaacctcattgtctttctcactagatcatgagtactttgagggcaggaactttatctttcatctttcatcctgaagacatggatcagcatatgtgtatagtaggagaacaataaatagttttcagaatgaaggggagaattaattttttcatgaaaactagatgtcattatgtggagaatttatcagaatgccagactggtaaggatgttcagagacacagtagttgacctaagactaacctaaatctgtttgtatcacagaagtgtaccaatgcttgacatacattggataaaatgtttatttcctatttctctgtattgtttggccacatgactattgcaaagctcataagcacaaaatttgcacaaaacccctgagagatgccatccatggctacaaatacatgttttgattatattaaagtaaaaaaattgatcaattattttaaatattcaaggtagttaagtgaataaattctatgtaattacaaccacaaggttggtgcatattttagaaataaatgcttgttttactatgagaggaaaactgcgaatggcacacgacctaaacaagggcatcctgtttgcttggatgaaaattccatccccatgtttactataccttccactctcattcaaacctagaacaggagaaaaatagttcgagtttaaaaacaaatccagtagagtttaggaaagtttgtctcgtataccacacctttaaaaggctattttgcaatgacaatattcttgtattgccctctctatttttccctccctattgtatacatgagcccagcaacttctagaatatactagcacatatgaaatttttgaatatctatttcatgtagggagattagaaagtcactttctgccacttgtgtagctctattatgcaaaaatcaagaggatgcagatcataaatcccattagggtggaactctggatgtggaaaagactatatagataattttaagagatttcccctcagctgaatcattgctataaagttaagcatggtttttaaaatataaatcaaataaatggtttctataaaggcacatacctttactgtaaactgaactccaacaaacttttgagtggacatttctcaaatacagcatctattgaaaacttcctctgaaaaaacatttcataaaaattgaagcttgccttacatattttcatactatgtggttttaatgaccgttgtattccactctatcaccataaataaatatgtgactttaaaagatatgttgtaaataaaattagctcgaaaatactaacactaaccaaacattaatcacagaatttaaggagactatcagagactaattcagaaaataaaaatattgtaaaattactaccatgaaagctctaagaaaagttcatgataatttcagtgatgctaaggctacagaccaaatataaacttagaaacaaaagtatttagtctaagacaaattaaatgtgtatatattaatttattttctctgtttgatgggcatagaagcccatcaatactctgaatttatattttattaatactctcacaatttactttcatatgtgacttactatgtaatataaaaaacaaaagagcttgaaaaactgagatcagagggcaacaataaaatattaatgctaatattatcttgaatttttatctatacatatttaaatgttgttatcctcactgaaatttgttactaatcagtgaaactttagtatttacctaaattagttcttcttataagtagctcaatctccataataggagatagactataatttgtactttagcataaatattcttctaaaatcattcaccgttttatattgtaattgactgaaacaatataaagtggcttaaaatcattggtatattataaaacctatgtcagataaaacatggcatctgtgaagtttgggaattataacccagaacagtgtataattcaaaacagatacctgaaattatcttgtacacatctcgctatctgctatatctcatcacataaaatgcatagtagatgcacaaagtagctgtccaacaaatacttatggaattaataaatgaaggaatgacaaaaatgcttttcctcaatgtgctaagtcaaatacatgtttccttttataaaaatttaactatatgttttagatttagttgaaaaaatctatactggaatttacataattacataatacatattttaaagtattattcccagtatttatgaacattcattaatgagaatggcttctacattaaaagatcagttagcctctgctatttttgataatgatttaaacttgttaattcttacctgtataatgcattctcctttacaaaatgctggtatggccacttgttttatgttatcctcacaacaattgtaggtatagatgtgataaataatatactcttcctattctgtttttctttttaacaaatgagaaaactgaggcctaaagctccagtgattcactcatgtttacacaaataactctaaactggcgctcagctcttgctaattctttgtctcctcttttgttttgtttttgtttcattttgtttccctaaaccataatgccatccaatattatttaaagtttgcctgcctgcttttgcaatggttcttagctttccacaatagcaagtgcatcaaagaagaaaaaggaaatgattatatggttattaatcaaactcagatatggctagtaccacctttataagtgaaacttatataacaatctcagtttatgtcagtctcttatcccagtgtttaaagttttaaggactgagctgggaatgtgaggaggcttttgcttttcattttgtactctactagttttaatttttcactatgtgcatacatctgcaccccaacctttaaagaattagtttcctgaaaaaaaaggaaaatgcaattcatcgtacaaataaaagcataatcccttttattaatttttagctaacaaacacataataccatcctattccaggtactgtttttaaatgacttgtatctaaatgtaatgttaacgcatactttcgatgtgcataaatatagccaagcagtcctaaattcagataaattatcttccatctactgtatataattatatagtatttcctaatttttataaaatatggtttgtgtgtatgtatactgttactcaaatgaggttttgttgtttttctctcctcaaggtcaaaaacaatatctcactctatcttttgtgtcttttgttttttgatttttttttttttttttttttttgtctgctttgaacagtttttaagaggaaaagaagaaaaggtgtttgggggttacataaaaaaagggagaaagagacccaaatctcctgtctcttttatcacctacaaactgtattgattttcactttcctttcctaaatccatgctttaaagacattgtccatctaagaaacatagagtcccaaagcacaagttttgatgtagtgagcacccattgattgtaccttgaagtggatgtaggtaaacagatgacagatagatcaggtagatatatagatatagatatagatagatttatcttgaattttcctagatcccattaatctgaatgtacaaataagtctcattagttctaatatttgtatttcactgcctcattgccctcacctgctgtagatgatctctgcctccagcaaactaatcctcatgcatttctggggagtccatatgggttttctcacttgcacttaggatcaagctggacaccaattggctaagtgccacggttactccactgggcatctccatgtcccttctctggataaacaccatcatctatgggcataaggagcactgctattcttccattgctgctccaccaggtacctgagctctcccactgctgtgccaggtggaatagttttccaccaggggccaccttagatattcctcgtcaggtgagtaccaggactgctttgctaggtagagctgtcccagtcgattctaatatgcccctctgctgttatatctgtatcactgttctgtattctgctagtaccaaagctgaatgagactatgttaaaagtagtggtggaaaaatgtctttcttccttgcctccctctttcttaagtgagtcctaaaagaatactgagtagattttggtatcttaaaggtttaacaaaacagatcttctttgttttactctaaatacaaatctgagtaaactagccaaggctctcagaatgatctctctcttctgagaaccagggcaccatacctggctccgatttctctcatggtgaattcttcaaaatgttttccagtgcatgggctttcgctgggttatctcccacgttgttcacaatgttcagagatatctgagttaacagcacacccagaggtgttccctctttccatgactgtcccccacaaccccacgccaagaatgccactccccagttctaatggcagtatgctgctggtagcctggccacctgtctcagtccatttagtgttcctataaaggaatcacccaagactgggtaatttataaagaaaagaggtttaattggctcacggttctggaggctgtacaggaagcatggcagcatctgattctgaggaggcctcagggagcttttactcatggtggaaggtgaaggggagcagatatatcatgatgagagaagaagcaagagagagagagagaggaggaagtgtcaggctctttttcaacagccagttcttgtgggagctaagagtgagaactcattcactcccatgagaatgatgccaagccactcatgagggatctgaccccaagatccaaacacctcctaaaaggctcagcctcaatgttggggatcaaattgcaacatgagatttggcagggccaaacaaaccctatccaaaccatagcaccacccaatttgccagatatacccaggcagatctaaatatatcttacactcacaatcaggtcctccttttatgagataccaaagatgttccattagggttctcagacaaacagaatggagaaagagagatttattgtaaggaattggctcacatgactgtgggagctgacaaatctaaaatctgaagtctgcagggcatgttagcaggctagatatccagggaagagttagtgttgtagtcttgggaccaaaatcttcagggcacgtattagtctgttctcacgctgctaatagagacatactcaagactgggtaatttataaaaaaggaggtttaattgactcactgttccacatggctgtggaggcctcataatcatggcagaagagcaagagatgtcttacatggcagcagacaatagagaatgagaaccaagcgaaaggggaaacctcttataaaatggtcagatcttatgagacttattcactaccacgagaacagtatgggggaaactgcctccatgattcaatcatctcccaccgggtccctcccacaacacgtgggaattatgggagctacaattcaagatgagatctgggcagggacacagccaaaccacatcagggcagatgagaggtttttgttcctcatgacacaaaatgtggtgtcttttccaacaccacttcttcaattctctgacactcactaggcatgctatagttcagctcagttctgacagtaactacctggagttagagtaagactccatagatttaagagcccagtcccacaagactaccttcccttcagaggccaggcacaagtattgagtccccactttagccacaattctctccagctgagctacacagtcttgggttcccacaaccccctcttcagggttgataatttgctagaatgactcacagaactcaagaaaatgctctacttactattgcagtttattttaaaggatgcatataaacagccagatgacaaacctcctcaaattctgtttaggggcttttaggaggtttcatgacataggcatgattgatcaaatcattagccattgatgattgactcaatttccagccactccccttctcccaagcggttgctgattgagtagtgaagctgaaagttccaagcttctaatcaaggtttggtctttctggggaacagcccttattttgaagtagtctaggggccgtctgacagtcacttaattagaacaaaagatgctactatcatctttatcactcagaaaattccaaggattttaagagttctgtgccagaaacctggtacaaagaccaaatatcttcttatatcactgcaggccagcagactggaaactcccatagaatttttatcatgcagtcttgaggcagaattctttcatctttgggaaatttcaatctttgctctaaaggctttcaactgatcggatgtggccaacccatactatgtagggtaatttacttaaagtcaactatctataaataaatgttaatcacatctaaataataactttatagcaacatttagattggtgtttgatcaaacaagtggataccatagcctggccaagttgtcacacaaaagtaaccatcacagatgtattattttatttaaaatcatcagtattatatgaattaattcagaaataaaaaaggtgttgtcatagtgtgaacacttataagtgtctttcccacagaaatgtcaacagactgtgatttgaaaattgctgttttaaaagagaaaagctcatcattctacagaaatgattcaaagatagacaatccattaaatatcttataatgggccaaatactactagttgttaatttacacttgcaacatcaaacactttaccagctttttaacatgcaactgttgcatatgatgcattgtgttttttgcaagtaggtatacagcataattctaataggatatttatttacaacctaaccttacaatttaaagtctgctactccattgtgctcatcctacccgctgtcttcttatattcaaagctattaaggagtacttgctcagcatatcactccaaattaaactgcaagacattttatgatgaattaaatgggtgacgctctcccagcctttgtaactactagagcaagtatccaagaagcagacaattttatcacaaaattctgattgccaagttgtttttattaaatagacatacagtagagaatttaatcttagaaagcatctaacataaacacagatttctcgttttatagatgaataaactaagatccaatgagggcaactatttttttccaagttcatgcaggcagctaacaccagaacaaagactaaacaaagctcttctaacttctccccccatttttatcatccattgcattcattactacaaaattactacaaaattattagcctggtctttaatggtggccccaaagaatggtttttagtattacttccttcacttctttcgtatgtcctgtgctccagctaaactgaactatgttgaactaagctaaacatttctccttaagcttgtactgcattttgctacagtctttttgccaactcttcccatccagaatgtcttcactctctatctccactgctttaaaacctaagcaattttcaatttaagttctatctcctttttgaagtattgtatattcttctagccagataaaattctaggaaaatattgtcatacttgactgcataaagatttaaattgtctatatagcaaaataaaaccattattgaaatgataaaacaagtgacaaactagaacaaaatactttatagcatacttatttaataaatatctattgatagcttgctaagtaataggcactatactaggtgctatatccaagtaatgttgacttattagctttcaattagaaaaagagaaacactattagatatgggtcaattagataaacaggcacatccaaaaagaaaaaaatatgtaaatatagtcacagagataataataataataataaatgagatgctacttaacatttttcaaatgtgtaaatattttttaaaattagatttttccatattgattagaagatggagaaaagagctctttcacataatgctgctgtgaatgaaaattggcaatttatatcataatgtgccacagttttgttctgtatggtctcaatcccccctgtaaatgtgtgctctacttttctctaccttgtcctgagctttagcctctggattctctttgggttctgccaacgtaagacacaataaagagaacaacagacaggagggaatgaggccgaagtgtttattcctcaggctctgtgcttgcaagggtccccaggctctgtgcttgcaagggttcagatgggcagtagctgttcctccattgaggggaggcccttcctacagtacagctgtctttccagctggatgtggtcctcagcctaaggcagcaatggcttggtctgtgtttagccactagctgcgttcttattcttgaatgtgccccttaagcctggcccaaatcctgtaaatagtccctgacatatttctcttcaataattccatttcagtgtgccatcttctcccttgtcaggaggaccccaaatgatccctctttgactgggaaattctacttctaagagtttatgcttaaggtgtaattaagaatgtacccaataatacagtaatccatattaaatgttataatagtagtaaaaatgacactagtgaagcacaaaagagaaattaatccaaactgaaagagtttgagaaggtttcttatagggtgtggcatttgatttgtgtcttaagggtagcatgagactatgccaaaaaagaaatgtgtatgtcttgccacccaaaagagatatcttggccattgaggatagagattcattactttcttatgctatataaggcgtagtatagggctaggttgaaatagtattaaaataatatttaaggattgattataggttttcattgagaaccattctcaggtgatactttactaagctgacaatagacttagcactgcctggcaaacagcaagtagcagtcagtgatatagccatgattattactgaattaacagcatcttaatcttcactacgatatttgaaagggaacactgattcataaacctactcttttcctgccacaggtagtcaggaacttattattcttattatgtctcattattaacttctgttgcctaacaagatattatatattgtatgtcacatgaatattttcttacaaagtattaattgattcctaatcttgttaaagaatatgatagtagcaaatatccaactaattctgagagaaaaacctccagttttgcaagaaagatttagccaagttatgcaactaagtttgttcaaataataactctataaagttatctcgattatctcctctttagtttatgaatcgaaagcattgatgaagatcaaaagctaactgatgcctccctaattctatatctatccttgtgcagaggcaaagtaggggagtcagtaggatgtttgtgtgtgtgcgtgtgtgtttttgtatgtgtgtgtagatggagacagagaaccatagcaagatagagagagaacacgagaggagactgagagagaaggaaagagggaggaagggatggatggatgaaacgaggggctttctctcattttatatcataaaagtaaccaagaaaaaaatcctgggttcaatattttataattattacaaatggggtattagagatgttcaggaagccagagtagaaggcagctagctaagaatgctgtcagcctaaggagtttttcatggacgcctttttattctaaccagccacagaagaaaagagggaaatgaagaagcatcatccttcactatcacaactgacaataagggttctcccttacctcccacccccgcccccactacacacacacacacacacaaagtagtgactgaaaaccctcagcaggctgggctcccctaccacatgccacctgctgcaaatgtgttggaggcaccaggtcctcctttcttttttgccagttttcttattgcagaaaggttttactattcaacaattaggagtgtccaaggtgttaggggtcataagatacatccttgttctcaaagcgcttataacactgtaactactgatgactggtataaggatgcttacaagagaaatttattaaaagggcaactcagtagagtacaaactacgcatatgttgaagagagtcaggagatgtttcatggataatgcaaacattgaacagggttttcatgaaagggagggatgtggatttctctgataaggtggaaaacataagcacaaatggaagaatttgttgagtttagtatgtggtttgtgttcagttttaaatataagtccttatcatagcaaagcgatttcttttctttttgtttttgttttttccttttttaaattattttactttaagttctagggtacatgtgcaaaacgtgcaggtttgttacatatgtatacatgtgccatgttggtgtgatgcacttgttaactcgtcatttacattaggtatatctcctaatgctatccctcccctccccgcccaccccccagcaggccctggtgtgtgatgttccccaccctgtgtccatgtgctctcattgttcagttcccacctatgagtgagaacatgcggtgtttggttttctgtccttgcaatagtttgcccagaatgatggtttccagcttcatccatgtccctgcaaaggacatgaactcatccttttttatggctacatagtattccatggtgtatatgtaccaaattttcttaatccagtctttcattgatggacgtttgggttggttccaagtctttgctattgtgaatagtgcggcaataaacatacgtatgcatgtgtctttatagcagcatgatttataatcctttgggtatatgcccagtaatgggatagctaggtcaagtggtatttctagttctagatccagacacatgaaaaaatgctcatcatcactggccatcagagaaatgcaaatcaaaaccacaatgagataccatctcacaccagttagcatggcgatcattaaaaagtcagaaaacagaaggtgctggagaggatgtggagaaataggaatgcttttacactgttggtgggactgtaaactagttcaaccattgtggaagacagtgtggcgattcctcaaagtgatttcaactctacagatcagtttgaaagcacaggactggatctcagtgatggttaattgctcatctggccaaagaaaagcatgttgcaaggttaaggctcctatgaggaaaaggagagcaaggatgttcaggctgaataaagcccctgtttttattaattataaggtcagaatctggttctcctggaatcaaaatgctgagcaagcaattgtggagcaagggctacacaatggcagagatgaatgcaacctgatattccacatgcattctggcgcagctcattgcttttcaggcatctacgagaaacatatcaccccttaggtttgctgccgaagatgtgttctcactgaaccataacctagcagaggttctcaggttggaataccaaatagcaagatgatgtggtcagtgctacctatattgctctaaaatttttaaacatctaattgatgatttgtgggaaggttgcacagagagaagaaaggaaaaccaggaaaaagctgtgtttttaatttatgaaatattaagaagttttcggaagaagacccagacaatatgtattagatcataaagaagcaaaaaagtgctatgtaattttctgatggtagaaacaaataagaagatataaattcctcagtttacaccatgagtttaaagaaaatcatcacctacttactggttcattttgtaaattgagatcaatgaaattctctgaacaacagcatgaaatcaatcgtaaaatagcacataattcatggccagtattgtaaattatagtttgcttgacagtaatcggtaaggtttccatgcactgggatgcatttccttgtaacacgtctaaggataatgcctgtggatccatttctaatgcatattagagtgatctgtttttccctgtccacaactccctgtgtttgatcttatgcaaatgatgcaatcaagcaaatggaaaacaagatgttgttgctcaggggctcttacaaacagtggccttatgttttcagggtttccccaccctccatttacccaactcagatttgtgtacatacctgcaattgtttgaatccgttgatccatttgtgttgcccttgaagtgcctaatcacatctatagagacatattaccaaatcagttgcagttaagctaggaggagagttgtcattactttcctctttgctttaaatttcaaattggtggctttgtttatggcttcactctcaaagaatttatcagcctcacttccctgtaaccaatctttttttcatttctttttgttaactgtttttaaaaactctctcattccattcatacattttacacatgactactccttccccccacgcccaacctgatgcctcctcctcttctccatttttttccctttccctcatcatttcctcctgttttaccaagaatttcccaatcagatcaccgtgcaactttctctgccacatgtcaaattaggttctcttctctctctctctctcttttttcatgctttattattcaaagaacactagtaacatttcatcttcttatggaaatacattgagaataatccactttgggatggacagtacaggcataaaaacaacttggaactcaaaaaagctatttaatcacaatggttttctttgtattatgtttacagttttcagatttttaaaaccaaaagaaaatacccaatttctattgtagtgactttcatgtgagtccgtgtgaagagaccaccaaacaggctttgtgtgagcaataaagctatttatttcacctgggtgcaggtgggctgagtccgaaaagagagtcagcgaagggagataggggtggggctgttttataggatttgggtaggtaaaggaaaattacagtcaaaggggggttgttctctggaggccagagtgggggtcacaaggtactcagtgggggagcttttgagccaggatgagccaggagaaggaatttcacaagacaatgtcatcagttaaggcaggaacaggccattttcacttctttcgtggtggaatgtcagcagttaaggcaggaaccggccatctggatgtgtacgtgcaggtcacaggggatatgatggcttagcttgggctcagaggcctgacattcctgtcttcttatattaataagaaaaataaaatgaaatagtggtaaagtgttgggacagcgaaaattttgggggatggtatggagagataatgggcgatgtttctcagggctgcttcgagcgggattaggggcggcgtgggaacctagagtgggagagattaagctgaagggaggtcttgtggtaaggggtgatattgtggggttgttagaagaaacatttgtcatttagaattattggtgatggcctggatacagttttgtatgaattaaaaactaaatggaataagagaaggagaaaaacaggtataaaaggtctaagtattgggacgactcaggacatctgattagagagtgcctaaggagattcagcatagtcctgccagcaaagattatttatttacttcaagagttaagagtggcagtttggggatagcatgaggagatgtcagctgtgatggcttggagaaacagtgtaaactggcagtgtaaacaagagcaggacatgtatgagtagttgagaacggtgaataggagtatgactagacagaagatagtagggatgacaagtttttttggggcacagtctaagttggtctggtgtctggaatgagactggggcctaataaaaaggagcgtctatacaggagctcaaatgggctgtactttgtagcattccgaggacaggcctgacttctgagaagggaaagtggtaaaagtattgtccagtcctttttaagttggcggctgagcttggtgaggtgtgtttttaaaagacctttagtccgttctacttttcctgaagacggaggaccgtaagggatataaaggtttcactgaatactaagagcctgaaaaactgcttggctgatttggctaataaaggctggtctgttatcagactgtatagaggtgagaaggctaaactgaggaattatgtctgacagaagggaagaaatgactgcggtggccttctcagaccctgtaggaaaggcctgtacttatccagtgaaagtgtctacctagactaagaggtattttagttatctgactaggggcatgttgagtaaagctaatttgccagtcctgggtgggggcaaatccttgagcttgatgtgtagggaagggcctgaataatccctgaggagtagtagaatagcagatggaacactgagaagttatttccttgaggatagatttccatgatgtaaagaaaatgagaggttctaagaggtgggctagtggcttgtactgtagcatagcctgcctttgctggtgtgtgatgattaggcctggtggaactgccatcaataaatcaagcgtgggcgcctgtagtcccagctactggggaggctgaggcaggagaatggcgtgaacccgggaagcggagcttgcagtgagccgagattgcgccactgcagtccgcagtccggcctgggcgacagagcgagactccgtctcaaaaaaaaaaaaaaaaaaaaaaaaaatcaagcgtgatcaggctgaggaacaggaaagaaggaaatatggggaaatggggtgaatgtcaggtggatcagagagatacagtcttgggtgtcaggtgtggtatcaggaataatgtgggaggctggattgaagtccgggccaggaacaatggtaattgtgggacttaacaaagagtgagtacagctgaaggagccgtggagcagaaagtatatgcgtcaggtatgaggaagaaaatagattttggaaattatgagaaatgtagagagtaagttgagcatagtttgtgattttgagggcctctaaagtattagggctgcagcagccgctgcacggagacatgatggctaggctaaaacagtaaggtcaagttgtttggacagaaaggctacagggtgtggtcctggctcttgtgtaagaattctgaccgcactaaccatgcctatgaaggaaaggaattgttgttttgtaagggattgaggtttgggagattaatcagacacgatcagcagggagagcacatgtgtttttatgagaattatgctgagataggtaacagatgaggatgaaatttgggcttgattgaagtaatgggggctatctgtgaagctttgaagtacagcccaggtaatttgctgagcctaatgggtgtcagggtcagtccaagtgaaagcaaagagaggctgggatgacgggtgcaaaggaatagtaaagaaagcatatttgagatccagaacagaataatggattgtggagggaggtattgaggataggagagtatacgggtttggcaccatggggtggataggcaaaacaatttggttgataaggcatagatcctgaactaacttgtaaggcttgtctggttttaggacaggtaaaatgggggaattgtaaggagagtttataggctttaaaaggccatgctgtagcaggcgggtgataacaggctttaatcctttcaaagcatgctgtgaggtgggatattggcattgagaggggtaagggtgattaggttttaatgagatgttaaggggcgcatgatccgtcgccaaggagggagtagaggtatcttatacttgtgggttaaggtcgggggatacaagaggaggacgcaaaggaggctttggattgggaagaggggcagcaatgagatgtagctgtagtccaggaatagtcagggaagcagataatttagttaaagtgtctcagcctaataagggaactgggcaggtggggataactaaaaaggagtgcttaaaagagtattgtctatgttggcaccagagttggagagttttaagaggtttagaagcctggccgtcaatacctgcaacagttatggaggcaagggaaacaggcccttgaaaagaaggtgatgtggagtgagtagcctccgtattgattaagaaggggatggacttaccctccactgtgagagttacctaaagctcggcatccgtgatggtctagggggcttccaaggcgatcgggcagtgtcagtcttcagccactaagccgagaaggggtcagtcagagaaccttgggccagagttccaggggctctgggagtggctgccaggtgagctgaacagtccgatttccagtggggtccggcacagatgggacgtggcttaggaggaatcctgggctgcaggaattccctggcctggtggccagatttctggcacttgtagcaagctcctggaggaggaggttctggaggaaggcctggccgctgcagttcaggcatttggaagttcttgtgtgctggagatgtggctggggttcgtctcacagtggaggcaaggaattgcaacttttttctattattgtacaccttgaaggcgaggttaattaaatcctgttgtggggtttgagggccagaatttaatttttggagttttatttaatgtcgggagcagattgggtaataaaatgtatattgagtataagacagccttttgactttttagggtctagggctgtaaagcttctcagggttgatgccgagcgaccatgaactgggctggatttttatatttgatgaaaaacagcctaaacgctatctgatttgggataaagaaaaaggagcattaaccttgactatgcctttagctctagccacctttttaagagtaaattgctggtcaggttggggagggctagtcatggaacgaaactgtaagccggactgggtgtaaggaggggaggtgataaaaggattatagggtggaggagcggaggctgaggaagaattgggacctagcttggcctggcgaggagcagtctggggaggaggggagaggtcagatgggtctgtagaaaaggaaggttagaaagactcagccacgcttggacgcttggggttgagactgaggggacaggtgggagggaaagaaggaagatttgggacgagttgcactgggcacagagactaggaagggaccgatgtgtaaaagaatgcctagacgtcaggcacctcagaccgtttgcctattttatgacaagaattatttagatcttgcaggatgaaaaaattgaaagtgctgttttctggctatttggaactactgttgagtttgtattgtggtcaagcggtattgcagaagaaaataagacacttagattttaggtcaagtgagagttgaagaggttttaagttcttaaaaacacaggctaagggagaagaaggaatggagggtggaaggttgcccatagtgaaggaagcaagcccagagaaaagagagagtagagacacggagggaaggggttcaggggttcttaccctccagaaaagtgggaaagaggttggggcatggaaataagggattggggcacagagatataagaggtcagggtgtggaaataagggattggggtgcagagataagaggtcggggcacagaaataaggtattggggcacagagatacgaggttgggatatttgcccctcccccagaaaagtgggacttgctgctaagggtgaaggagaagaggttgggggtttcttgccccccagaaaggcagagaaggggtgaataatcagagaggcgtccctgcaatgattaaacaccaagggaaggctccttcccagtccgtgactggcgccagagttttgggtccacggatgaaacatgtctcctttgtctttaccagaaaatgaaaggaattgaaattaagagaagggagagattgaagagtggaaaggagaaagtggttgagggatagtgagaaaggttggagaagagagtaagaagaggttgcttacccaatttaaaattggtgagatgtcccttgggctggtgggtctgaggacctgaggtcgtaggtggatctttttcacagagcaaagaacaggaggacaggggattgatctcccaagggaggtcccccgatccgagtcacggcaccaaatttcatgtgcgtccatgtgaagagaccaccaaacaggctttgtgtgagcaacatggctgtttatttcacctgggtgcaagtgggctgagtccgaaaagagagtcagcgaagggagataggggtggggccgttttataggatttgggtaggtaaaggaaaattacagtcaaaggggggttgttctctggaggccagagtgggggtcacaaggtactcagtgggggagcttttgagccaggatgagccaggagaaggaatttcacaagacaatgtcatcagttaaggcaggaacaggccattttcacttctttcatggtggaatgtcagcagttaaggcaggaaccggccatctggatgtgtacgtgcaggtcacaggggatatgatggcttagcttgggctcagaggcctgacagtgacgacatagcagtcagatttcccaaaccagaaatctgacctaacaaactacttttttggtgtgaattagcttatcttaaaaacttagaaaacatttcaattgtacctaggttctgaaaatcttgtctgtgtggttatgataagcataggtgaggtgctggttgagtatgtggcattcataaatttcagtcttcaagacatatatgtatgtctctatctctgtgtacagttatgattttatttctataattcagtttaatatctgactttactcccatgcaacttagtagtaagtaaatcacagtcactttgggggtccccccacctctactaattatgtaaaagcttctggggtcttacctagttccttagcatctggagtgtggccacccaggatgctttctttctctgtgcaaagggataactattgagacaacccttccacattcagtgggtatcctcagtgcttctacatcacacttgggcaactgaaatctttacaaggttttctgtggccctgcctgaatacagacaccaaagtctttctttttgctctggtcttgcccccgacctgggactctaccttgaaaacaggggtcagggcccctccttcagagagcttgcacatttctacttccttttatccttattccatcaggcagggaattctgaattagggaagtggaagactccatacttcctatttctcccaacattatatctgagggaacagagtcttccttctctgttccctcagtcactctgtccagaagatttttttgtttttttttctgcctcctgaccagtcacattctgttttacagagaaatctattttatagttaaattctgattttataatttaattgagtgtactagttcgttttcatgctgctgataaagacatacccgagactgtgtaatttgtaaagaaaaagaggtttaatggacttacagttgcatgtggctggggaggcctcacaatcatggcagaaggcaaaaggcacatcttacatggtagcacacaagacagaaatgagagccaagggaaaggggaaaccccttatggaaccattagatctcatgagacgtattcactaccatgagaacagaagggggaaactgcccccatgattcaattatctcccaccgggtccctcccacaacatgtgggaattatgggaactacaattcaagatgagatttaggtggggacatagccaaaccatatcactgagaagcatttagataaaaattaaatgcagaaaacatatagggtcggtagcagggaaggacggaagaaataaaataggttagtatgacaatcagattgatctcagtacccattgaacaaatcctgagcattgtaggagtttagaagaggaagctctaagggcttcaatgtaaacccttacttggttcctcaagagaattgtccaaactatgaaaggagaagaaggaaaaacaaatcaatataatgaagagagtcacaaaggaacaacataattatggctgaaaagttccaaaagcccagttcaaactggaaaacctgaaattatactagactctttcagtgtgttcagtgacatctctcggaaacatcttagagatatgagaagtattagagacataagatgataagatttatccagaagtgggaactgggatagccatatagaagaggactggggatgtgaagaaccctatgtgacccagggagtatggctttgtaatggatgatcaaatttcattgatgagggaaatgaaactattgaaaatatctgggaataagaaggtaccaagagactggacattgtgtagcggcataggagtgattgcattgatgtgacaagtggaagaggtgggaagtaaccagtttgtggtcagagagtgcaggatttagatttagaatcttggaaatcattctgaagattatgaagtagtaggtgtaactatgctgaatgttgaataaatgaagtagaggtgaagggcattgcatttgaggaagttaaagtaaagccagattcagagatgagtcattattgaggatgttagagttgccaaaaagggattatgattgaaaagaaaactgagccaatgctgaagtcatagaggagagaagcagtgtgaccggagatgtgatgggggcatgcgttaactaggttggggcatatcttcttttaaataatggattgatattaactatggctattttttctccatctatgatataaatatatatcacaaaaaatttgaaaaatatatgtaacaaaaattaaatcctctatatgcactcactcagaaaaacattgttaacatttggtttaccactatctcctgttttgtttttattttttttattgtttctttcttttacaatgaagcactggtactttaaaattatgttttggcattcagacaggtacagctttgcctttttctcgtatttaatggtaaatctcctttgtcttacaactatagacccctacattggcccaacaattatattcattatattcttggagactttaaaacatgtttagacattactatatttctgagaaaaaaaaatggcagcctgggtagagggcatggggatatccttctggtcttgctcattcatttacaacaagtaaaattatgcgagttagtcatcacaccattcctggagatatcctgctgaacatgataaaaaatatttatctgaactcaagaagtttacattctcctgggaaggatataatatcaagatataaatgaaaaggcaatattgaacttgttttagtaattatgatatggaactaaacaaggtgatataacaagaacctggggatgatggtggccatattgttcaattatcaagaaagaccactcatagaaggatgaagctgaagcataagaaagagcaatccaagtacaaagagagagaaaatagatttcagtcagaaggagcagcacctgcaaaggcccagaagtgtgaacttgttgtgttagaagaacagaataatgtctagtctagtgtatgaaaaaaatagggagaatgttacatcaaataggatctcattgaccattattagatttcgttctaagagcagaagaagggtactacagggtgttactctgaagaatcaaaagatcactcatggtaaatggtcttgttttcttcattgggaaaattgaagtagttagaggataatgcccatagactctgctaccatctacccacctaccagtattggcacccacatagtctgcatcccctcccattactatagattgtctctgttccaagttcaactctttcacttttgaactagattctcctctttcacatattcaaggacaaaactccagcaatttttttctctttcatccacttcatagttttcccttcactagtgggtcatcccatcacatacaacaaatttttctctcatttaaattactttaaaaatcttctcttgattctacttaccttttatctattgctacatttatctgttctcctttaccacaaaactttttgaaaatgttcttttattcactgtttctaattcctcttctatttccttataagcccacttaagtcaggctttagtgctgacaagttcactgaaacttcaattgtgcaattactgatgactgccatattgttatacccgatggccgatttttaattctcatcttatttcacctttaactcttaaaaattacttcctttgactttcaagacaccataatctcaatgttttcctcataccttactggtcactctctgtctccttggttgatttctcctttactcattggcctcatatgttggtatcccagggttttctcttttatatctattctcactccgtttgcactcctagccatctatatgatgatgacttaccaaattatatatctcaagccatgaactcttcctgtaattccaaacttctgttcaaatatcctgacaatctcctcttggttatctaactaacatagcaaatgtctaattgacattcattatatgaattcttatcttcccctccatgccttcctcaaccaataaaatggttactttatccttccctttgctcaggtcaaaagccttggagtcaactctgggtcttctctttcatactctacctacaatgcactgggaaatcctgttagctttgcctttaaaacatattcagaatttaaccatttcttacttgattattactggcccccacttacttgatattacaaatagcctcttcagtgagatgtattcttatgctcttgctcactaccatctatacgtctggcagccaggatgatactcatgaagtccatgtttgattgcatgacagctctgttcaaaatccttagtgtcttcctaagtagaacctcttagattaaaaaccaaaattcttacaaagacctacaaggcctgcatgaactgacccctcattaaatctctaatatcatctctaacttacttcttcctaatttgttctgctccagccacctcagcctccctgctagtcctcaagagtgtcaggcatgtccctccttccacagctttgctctgcttgttccctctcttggaatggtccaacccaaaaattcccataacttttacactcatccccacttcaggtctttgctcaaaatgccaccttcccaatgaggcctctgctgactcttaactattaaaattacccagaacttctaattctccttcctctgttctgtgttttctgcagcagttttcatgtaatgcagcatgaacatcttaaactccgttacacattcactttaaagacatgctatcttctaaaatgcaacacctttcttacccataaacttcataataccttggataatctagaggcaaaccctaactagggatggaggatttgacaagctcaactaaactatttctatttcaatcctggctcactagccattctaaccctctcaagcaacatgagaggtatacttgttctaagtatactcacttcccatcctgaccgccccctgccccagtcccagttgttatagaaacggacacttcccactccatggaagaatccgggcacggataacaaatcctgaactaattgcttcaggaagctccttccatctgaggcggatattctgggtgggtttagggcttaggtgatcatagtcaccttcaacgcatgcagtttataggggaaaggtgagtggggcactctgtgataagcagacactgcgatatgtgataatatgatgatgcattcttgagatacctaagtcctaccttgagatacctaagttccagatatgcaagtctgtaccatggaaacatacgcaagcaagcatcgggcctttttgaatggagtaacttcttcaccacctacaagttgggtagctaaatccccaccccagcaaagtagaatgtaagaaagaaggaaaacctatcccactccaaagagttcactggccaaagaattttgtagcatccaatctcggttgcggctgaccaagacaatctgatatggctattatatatttcaaggtcacgtggatttggccacatggaatataatttctggctggagcatgttctttcagaaagttggatgtgttctcagttgaaacactataggttttctccaattgcactgaattacccatcaggaattcctctaagcttggtgacctccttggttttgctcctgcaacgggacttagagtcaaatccccagcttctctttttcagggaggacaaggaattcagacagatgagaacaatgagagagagaaaggtcaccagagagcgaagatgaagagaacagaggaatggcagatacaatatgttagcatataaacacattataattttggccaagattggccctgtcggtaggagtttttctttgcataaagttttctctcagtaaataatagtctactctctcggtagcatctgaggccactgctgtaatgattttttaacttcataagtttcctagaacgttggtccaaatgaaggcaccccagttatgtctcagtcgtgtacctatagtgcgactgttgctgccatctctcagcagtccctggcaatgccacactgcttcaccatcagcttcaaagtgtccttgaagtatatattctgactacattgaatgggagtgccccatctcaacttgcaaccattggattcctgtaggatagaatttgtaaagaaaacaaggtttaatcaaaagcattaagagtctcttcttgttgacaactttttgttctaaggtaaccatatttactgtaaattatttttttaatctctcttctagtgacctacatgtttaaccaattgattgtactttgcatgaaaatcaaagtgttctttccccagtttacttttgttatcagtgcaatgcaaaatctgtttgcctgaattaggttgcatttcattaatctcttcaatatgaaattgtggtggctcatggttaatgagatttaagaatctgtgttacttaaattgtgactaacttattttaaaagtatgtcagaaaataatgattgtttctagtagtgttaaagtattaatgattagtaagtcttggtacacctgactgaactttggttagattaccaagtgtaatgaagtgttcaggatatttcagaattgagttagtatattacagattagtttaatctaatacaagagaatgtggtatctattagaaagacagacaatataaaataccagggaagttcaggggagggagagattctttcagcctagggcactaccctagtctcatggtcatctttcagacctagctcgtttcattcattaattattcattcattcaaacacacatattcaaaacctacaatgtgccaggtattgtgctacatactaaggatgcaaaatgaatatattaccattcctgctcttaaggtatttagtgtatcatatagtcatgacacagtgtttttaagtgttaagctaaaagtatgtacaaagagaaagagaagaggctaatagctccatcttgtgctggggtgacagcaaggagtgttagggacatcacaaggaagaaacaggcatctgcactgcacctcgacaatttgaaggtcaaataatagtcaggtggtggacaggagaagaatggaatctgacaaacggaattacaagctcaaagtcattgttacaagctatgtattggcatttcaaaggcaactcctgttgtcttcaaatatgctttaaaataatttaaacatctcatttatttttaaacagagccattgaactaagactaaacttagcaaatgatttacctggtcacagacgttcaagaaaacagtaaaactgttaaaatgaaaaagtcaaaacaagagtttgattgacacttgtctatttaaacataaccaaagtatatttaagggatgaagcatcctatatgttattgctattgatttttatggctatttattcatattttaagccttatcttaacaattctctgagataggactatagtggaggagtgaaatctcctcaataagaagtataatgctgagtaaattcttgtttctccctatcccctagatttagcagtatttacaccccaccagtttctactaagtgcatgcacacatgtgggctgtacaaacagttcctgggtcctactgtacacagcacagctgccaccagaacacgtggattccccagttctgactgtcctggattctagaactatacacatacagtaagtagaaatgttgtctctctcacatgctggttcatgcaagaatctcagtgagttcaatcaggggaggagcttgtgacataaaattaattttattgtgattaaatgcatagaagtgattagttcagtggatctgggaacctttgattatcacttgccagcctaatttccattttgtctttatgcaatcaggctgagctacataggtacacagattccatgcaaacttcaataaacaaaaaactgaccactttcatgactgccttgaatattttatgtttggggcattatttgtaataatttggaattagaaagtatgtatatctttttgagtatagtccaggaccttcttattcccttattacctgcagttgatgtcagaaaggaagtttcacatataggcatgttctgatgatttctggtattactgattcttgtccatttcctgatacctgaggtataaggtgtactattgtgctgagctaaaatctaataggtctctcttatcaagagttaatacttgttcatatttatctcttctggactcagttttcttatctgtaaaataagagtttagactaaatgaattctgacatttattcaagccgaaaaatattatgattcagatctcattgttccatgtctaaattctcctgttggcttcattgtgcccctaagccaagccacgttacttagccaaaaagatttcccacgactcaggtgtttctcagcttaacaatttcctgtctgttctatgacttgcccttctcatttccactgctaagttgtaaccctcatctgaaatgccctctgttcttccttctacctatccaaatccaatccatctgttaagaataaaatcttatgtatctaagtagtgtgtcacttcattcaagaagtcctgcctgattttttcagcccttccagtcatcaatttcactgttttctctaattacatattaaccctgtgttggattcctggattttccaggacaattatattattccctcttttccccatatctaagttctcagaagttctgcttctgaagtttttgttctacagcttaaattcaaaataaatactcgcttatacatttttgtattgttagctaattaaaattacaggtaaccagatggcaggagccatatcacatttcctttttgcccctcagaataggcattggataactacttcagtgttttattttaaatgaatcaattttgagatttatgttttttaaaaaagtgtcacaaatccaagttcaaatgtgtcctttgaaaatcctgtatattttagttttgacttgaatgaatgataataatgtattttaccattcccaggtggaaacaaccaagaaaaataagtgggattctggaacgctatgtattatatatgtcaaaccatacacatgattttacaatttggagtgtcatctataacagtacagaacttttccaggatcatatgctacaatacgttttacctggtaataaatatctcatcaagctgggagtaagtttatttccatcactttctctgtccccattccttccacttcttctccccttcccgtggtccatcttttctttctctctcacttaaaaaaaaaaaagtcaaaatcttcatgtattgctgtttatactgaaaactctcttcccatcctaaatgtgaattctggtgatctaatacctacacatttattttatattatgcaaatgatagaataacaccctgagtcagtagattttcccaagtcaaagttgggattatcaagattttcaaaattacttgtagaacatcataattgttaagaactttttctaaagtgctaggattcataaggttatttccctgtggcatttgtattcatttaaaaaacaatgcacagtatgaaaatttagatcttatatttttaaatggaagtttaaatgaccgtcaaatattcttgattgttattacattctggtttatattatgctcctatctcagaagaacagtcacttaataaaaccccagaatcaacatagtttagaggttcccttagacaaacaatagcattttttaaatgcaaaaatagcacttttacacaaaggtcttttaaaagaccttgatattactgtggaatttatactcagtaattccttttgttttttgatgaaatataatcttttttaagtttaatagcacgtctgaaaataactgaatataaacatgagattgtccctatttgttttaaacacactcttcattttatagcaatacctatataaggatatttgctttgataaatgccatagaaaatattctgctcttgattatgaataaatttacatttatgtagacactgtgtatgcattcattttacttaacatgctcttgaatgctctaaatattataccatgagaaaataaactacactcaactattgctaactgtctgacttaacaccacaaaacaagggcaatcagacagtggttaaaaaaatactgttcaaaactgactccatgtgcctaggtgttctgcacagcagtttatgaaacagcactttggttatgtacagttttattacccattaagtaagaaatatactaacttgattttcaaatgctaacacagaaatacaaactattttcaaaataatggtagtatcaaaattaggaagagtcttaattttttggaagcaaccaaaactaaaccaaaaattgtgctcttggttgtttatcagaagtaggcaaatgacatagaacagattctcttcctagggccgtttttaggatgtgctgtgcagtcaatcaattcatatcaatctcctagattttataaatctataataccttgaaaaatacatactagtagattaggagtcctctgccctgagtattaattcagattttactacaaactgtgtgacctaaggcaaattcacttaacctcactgagttttattttcttcaagtctaaaattagaacattgaactaaatgatgtttaatgtctctgagccataaaattctatgatgctaaaaaaagtaatcccaaacactattctatggagtcaaatgctatctgtcagccgctgaatagtgttgatgcaagatgttataaagatgtgaaaatccttgccttaactcttggtagggaaataaacttgctcacattattttcaagttcactatatttattagggcagaaaataatatattttcagggaggattcaactaacagggtttttacttaactctgttaagcagtaaattaaatgaaccagaacattttaggttcatcctggttaattgagggattattgtatatttcacagtttcaatataataactggctttcaaggtcattagattagtagatcgagagcaggttctcagcaaagtggagttgcctttatagatcattttagcatgtcgactaagagctggaaaacaaaacataaagataacaaagcctttaagcagcatttggaatagaggaagctacacggggatttgaaccactatgatttaccctaggcttggagcaggtatgttacttcatgtaacgtcatttagttttcacatttgactggattataaactgctgaaacataaggactgaatctttcaaaatttgatctgcagtttcaagcacagggcctattggaaatgggaagctgagcaaacaattcctgaatgaatgatcaccaaggacatcatttcataaaggttctaagacttttgatatgaattaaataatttgcttggaaacactggaattaggaatggtgtggttccaaaacatactctttccactgcaaaaaaaaaaaaaaaaaaaaaaaaaaaaaaaaaaacataatatgttgctactctcaacaaaggctattttgaaatgtgataaaatgtgatagctcctaataaagaagacaatatgttaaaaataaaataaagaagctattaatacagacagctatcaagacaggtgttgcttgataattttcataccactgctagccatttgtaacttgatgaattctaagtattatatattcctgaaagattcctggaagtggcttcactttttaagtaattatggatcaagtggcctttttctttttcttcgtgctttaaaatatgttgcactcttaacatccccaatccctgtggacctgaaaacttactggaaaagagaatgctagttttggtccgggcacactggcttacatctgtagtctcagcactttgggaggcccaggtgggcagaccagttgaggccaggagttcaagaccagcctggccaacatggcgaaaacccatctctacttaaaatacaaagaatagccgggtgtggtgctgcaagcatataatcccagctactcgggaggctgaggtacgataatcccttgaacccgagaggcagaggttgcagtgatctgagatctgccactgcactccagcctgggcaatacagcaagactccatctcaacaacaacaaaaaaagagaatgctagttttggattgtcttaatagtcatgatttcaaaaataattgataaaattttattatttatgcattttattgtaccaaaattgaatcccttatttggccagatgttactcatcatttcaaggcagagttatgcctttatgaatttttcaaaatggctgtaactgagaaaagctataggcgatggttaaaacaacttattttaatggctctcaggctttcaaagaccttgctatttcataaaggcatttttaatcaaccccactattttgtttagtttttccagaccagaattttaatcagcattcagctgtattgaatgtagtggcctctggtgcgggcaggtcaaacaagatactgattggttcaatttcatttagatgatgtcagattagaccaattggaagcagctttaagaacatttattttcccatcaaaggaactaagataatgtcctgcttacttaggaccctctaaatgcatccaaaaagaatgtgggcaaaacaaaataaaataatttgcaggtaattctgttatttcagcagcctctttataaataatttcatttacaagaaaaatgctttcataaatgccttacattcttaagagatttctttgtcaagttactggtttatggatctcagatgacatagtagatgaaacagtccttctaaaccaaaggatgcttttacttatcctagaagacatcataaaatcctcaaagtaaattttaattcacactgtgttttaaaaatatatacttatatgttgtatagtatagaatttatttggggagagttagcaggggaaatattttagtatacaaataagaaaaaaatagtgacaagtagactatcagaattaaatcccagtgtgttacaagtttaacaataagaagctgcaacatttttcccttctaaggaaaaaaaatctgaaaaatgcaaatggatggattttttttctccctgagaagtgggaaaaatttgtctttgaccatttttcctttgataactcagctgtctcatatggcctcttttcctgccatattttctggtggacttttagcacatttgaaatgtctggggtcttcaactttttttctattttaatcgttgggcaattattttttgagctcacagtgacctgtcctaaagctttgagtcagagtttggccacatttgcaaagattccattctctagaggagtatggtttttttcttgcacagaaaggcacatgccacagctgagaattagaggaaacccacagaggttaattaggtacccaatcttaatgcaattttcatgctcaggccacaatttaacccatctgaaagttgcttaattaagctggtaagaaattatcctgaagacatgggctattgctatagtcttgtaatagcaagtgagattaatttccatgtttgttgaccataaactgttgtttatgcttataatgaagaatttgcaactagttgcaacaactttgcaaatagtagtgtactcccatatttaaaaaaaaaatctaaaaatcagtcagcttccttctgtctttggggaaaagaatatcgactactttaagaatcacaaaatcactcactcagtatcaaactgaaaaatcagagagacgcctaaagaaagagatgctttaattttttatcttagtaatatctgtcttacacaaaaatgagctaaatatctctgcttttttacattgtcttatgattttgctttattttctttttgattttggtaaaatttagtgccttttgaaagatttttaaactttgttgtatcaattgaaattgtaacttgaagagatactgaaccaagcttaagtatagttttcaaatatcattgttatataaggatataattactaatatttgctagcaaatatgggctgaaaaccccttaatgtatttatcaatttcctggagaagtgcttgtccagtaagtttaaaacattatttgcagtttattatgaaattgcacacggaagtttctgtaacattcatgttaccatttctgacattagtgatacttaattagggaacagagagttctgtgatcatgttaaatttgtcaaacatgttttaatgaagcctatctactctgacacataagtaaattatgtgatcctttaagccattaaacattcactcaaaaattgctttgtatttgttgttttatgagaaacattgttttatttaattttatttggtgttatgctataaacatattggtcacactgtagaaataaaaggcaattgtatttgctgcacatcttttcttccctagaagtcagttgttttgtcttaaagtagtcttcatcctctagtactttacttatgttatgtgtacacatgctgtgtgtgtgtgtgtgtgtgtgtgtgtgtgtttaattcactctgggaacctttgtgcaaggctaacttcagcagggctgtttatccagtcaatatatgccctacatctctaggctctgacttaagatgcttccttaattcatacattcataccatctcagttattctctaactattggggatggctatcttatgtcttaaaaagcaaattaaataaatgttaaatcttaacactgaaatgaatttattttggggaagtaaaggtagcactatataacaaaatctgaaactcttattatgaattctctttcctcaatgttcatgaaaacttttgggaccaagagtgaaatgagcatttttgcatctctgtttaggcttgcacaggtggtgggtgcacagtgagtgaggccagtgaggccctaactgacgaggacatacccgaaggcgtgccagcccccaaagcccactcatattcacctgactcctttaatgtctcctggactgagcctgaatatccgaatggtaagtgaactcttttagcctcaagttaaaaagatgattagcaaaggtaaattaatattctaaatggcagcttatatgtggtgcttaatttttaatgatcattttagcacataaaatacctaagatagtatcattgtctctagttggggagattgtggtttttaggctaacacacaattttggtggctcaaaagtgctcccttttgatagtttttgtgtactgcatctcattgtttaatatgctccaggagaggtgaagagagcaaacggggaggattcccaaagaatgccgtagtgagagtgacattgtattttcaatgactttctgtttttaaaagccattagttcttccttggcgaaggagagaggtggaaagttcatgtacatattgtgtcaaaacgcttttgatttaataagtttatcttaaaagaggccacttggaactctgtattttttaatatactatttataaatatttcaacatgctgtttttaaacaatgcatagattaaacatacatatatttatacatatttagctggaggcaagttttgtgcatttctaagcaatatatatgtttttgtacagtttagtgaattaagctagtcagttacgtttcactaaaataaaatctcattatgaagaatttgtaatagttttgggtagaaattgctttattcatttagtggaaatatctttaaggttcatataacatagtaccattgtttcacactgatggaagcttacttgacattaaatttcattcctctttgagacaaatatcaagaagacttttaatatagaaactcttttaagaaactcattactgaaaattgaaatgggctcttttagcacagccaaaaagaatgaaagaaaaaagttacagttttattagtttgtcttatgtttactatgatattaattattccagccatctcattttaattaaacttttggcaaatgcactagatatatttgaggtaatggagagaattctaataatcagagtgaattattatctctgctattgaagttattcctgtactattacaaattttccaagaaaaaataaatggatgcctatttgataccatattaagcaatcaacaatcttgttatgcttcttacttcacaaagtaccctagttcatagatgacaatgaaaatgttaatgatttatttcaattggattgctgtgaaatgctgttacatgatttgcatagtagagcacttcccttcatcccaattggttaatacaactagaactacaattgctctcagaatcttcagctgttcagggaaacattttccacattacaaagctctttgaatgttttgtgtatttgcgtatgttttgtatatttgcaagcagttttaaaatgtactcatcaagcaagaagaatttgggagattttggagatttgtattgacacttccatggtattccaaagtcttgtgtttaattagagtgggatttttagaactttaattgtggtacaatggttagacatttaaaaggcagttttattttttttaaaacgactttttttgtttttactacttctccccactttcccccaattttttagctttttgtttctcttgttgattgtctagagagggataatctgattgttggaaaacatcttgtctctccatctgtcttcgaagtccccacacctctcctcaaatacccaaagaataaagtctaaattttttagtctggtattcaggttactaccaacttgtgactcaacctgaatacacattgccttataacatatcttcctttctagccatgctggaatatttatggcttaatgttgggttggaaaacatgggtggagtcaaataggcctagagtcaaaaattgtttctgatgtatagtgactgtgttacctcaggaaattcattaacttccatggaccccaatttccttgattagaaaattgagattaacaggctgggcctggtggctcacgcctgtaatcccagcactttgggaggctgaggggggtggatcatgaggtcaggagatcgagaccatcctggctaacacagcgaaactccgtctctactaaaaatacaaaaaattagccgggcatagtggcaggtgcctgtagtcccagctactcaggagggtgaggcaggagaatggcataaacctgggaggcggagcttgcggtgagccgagatcacaccactgcactccagcctgggtgacagagtgagactccatctcaaaaaaaaaaaaaaaaaaaggaaaattaagattaacaatccctgtcatcaccctgtccttacctgtagaaatacaactcattcttctaggctaaccgtaggcctcttattccatgaaatcattctactcttccttaagtttaaagtaaactttccctcttctcttgactatgtgaactgtttctatgccttcataatggaacttcattcagcctgtgcttaaagttatttgcgtatatgtcaaacactcccaccagatgctaaggaccataaatcattaatttctctttcactccgcagagcctaacacaatgttctactttttattggtacgcaataatatttaattcatttaatgtttcttgtggaaattacctttgatcagtggcatatatactccaaagccctggctctttaatgataccaagagagatgatagaagtacttaccatccagtgtctgcaatatatttgttcaaaatgcatttgttcctaaaatatatttttctagctgtgtagattctgaggctgggtttctcttttgagaataccgatcttgcatttgaccaaagaatttttaattttcttttctggattatgcccaattcaaagttaatggtaccaggctcacatggcaatatatgctacctaatggttgctttctaatttctgaatatgctgctgaagagaaatacaattggagaataagatagacttcattcttgtgtaactaaataaaccctttcaaaagattttaaatggtatttctcaaacttatctgattcttagaacaatcttgggagcaccaattgaataagtagattctaggctccaccacagacctcctaaataatcagaatcttccactgcctcggttatcatcaaaatacccctgggtatttactacattttccaactgagacctctcacaaaatcctccccctggatttttgttacatcttaaacccagcatatccaagttgatttctcctcatggtctccatctctctgcttgctctttctcctgtattccctctctcatggatttgcaccacccagccctgccagccagtatactgggcagcagtcttcaccttaaaccttgctcacccctgactgctgtcaccacacaacccctcgactgcacttctctagtgaaggccattaatattgctcacccagatcgcttcaggagcctcctcatgccatgcaaaaaatttgcatttgttcattcaaaatatgtattttgatgacctactaggttccttcactcttatctatacagtgcatttccttgcttcttgatctcaaggatatcagagtcctcggggaaaatatccatataaatgaattctcacaaggtggggaggtgcacaaggtgccaggtacacagagaagcagctcctagtggttccctatgagatgtggacatgtcatccctctgcatcctcacgaagatgttgcaggaccagatatagacatgtgtttagtctgaaacaggtattacttgcctggttttgcacactcaggtttcaaaatcttgactctgttaatcagttatgtacctaaaggtatgtttgttcactagggatttataaacatgaacaaagacttgttgagaaaaattaaactcaatttctataatgagaactaggtatatttttatgcttgcctatatatgacaaaatatgaaaggtataaaaagttctaatataaatgtccagtccttgccaatcaaacaattggtagcctttggccagcgtggcttaggaaacattctgtccttgtcataactgattctgacttaaatgatcatctcctactcgtgaaagtctgatggtaatccttaaccaatgctttaagaaaagatcctctccccttgttatttcagttctcttccttgtctcccagcctggtcctgctccacagtgtctgtgctggaaagcttgctagttggttcagtacatacttcatgagccctgagaatttttcctaatttggtgtcttttgttcagcagtgtaccagcagctccaagaatagtgcctgagacataataattgctcagttaaaaaattgttgattaccattattaaagaaaaaaacagaaaacaacatgttctggaaaggatgtggagaaactggaacccttaaatactgttggtgggaatattaaatggtgcatctgctatgaaaagtagtgtagaggttcctcaaataattaataatagaattattagatgatgtagcaatcccacttcttgaaatatatccaaaagaattggaaacaagatgcattgcagcattattcacggtagctacgaggtgcaaacaacctaagtgtctatggacagataagtagataagcaaaatgtgatatatttacacaatggcatatcactcggccttaaaaagaaggaagtcctgtcatacaatatgctctggatgaaacttgaggagattatggtaaatgaaataagccactcacaaaaagacaaatactgcatgattgcacttacgtgagtttatctatagtagttgaatgcacagaaacagaaattagaattacggttaccaaggtctgggtggaagggggaaatggagagttgctgttcaatgggtttagagcttcagttttccaagacgaaaaagttctacaactctgttgcacaaccacgtgtatgtagataacacaatggtacacttaaaatggttaagatgcccaattttacgttgtgctttttactgtaataaaaaaaagatacagagaggatgtaataaaatgctataaactaaactagaaaaaaagattaagaacagtgttagtttaaaacaaaaaaaaattgctgattaataatcacatagagatctatgcatgaagtatgcattttttaaacaagggtgagctcatactatttgagttgttgtggaatttacttttctcacttcacaatatggtgcaaacatctttccttgcagttcagtggaacgtgacctcattctttcaaaaggcagtatgcaatcccactgaatgaaactacagcttacaagacccatctttttattgatggacatttctgtggtttttgctattacaaacaaggttacttgctattaattgcctcagtctgccaagtacagtctttaagtactgagtcattatcacttgattcacacctaaggctttgcttgccttcaaatatgtcctgcttaattctagtcccttgcttcacatacctgcaaaaatgatggtgtgacactccagctctgtttctctaatcagagtcctttgcacccacgttccctctggcaaaggtgttctttacaggctgtgatttcagacatgattttaaaaccgctgaaaagagcgacttttaggtccaaggtctataggaacccttattatgtaggaccttgacgcttcctttgtaagaccattagctatcacagagaagtagcacaaaggattactgtctaatacatttgtgacctgtattgtgtagattgcaattgcgtaattaaagttctgcttttgagagcttccaaattctcatgagccatattcctttttagaagcttaggccttagaatcctgaaatatgttttttcttcacacttcaagtctaccttgctaaaacagcatagctatctgactatgccaaacttattcgtcattatctagcataacatttacagtgacattttaaactaattagaatatgtgttttttttaaatactaactaaaaatatagaatataaaatgtttatcttttattaatagctataattccttgtaactaacctctatctttacctaagtaaatcgacctaaaatagtttctttattagactgagccccatgagggcaggaatcatatgtatctttttcactgccctagtcctggcctttggcagagtgccacggagtagaggcatcttataaagctgtcgaatgaattaatatttaccgatgatagggacaataccaaaattgtaatagtgttgatgtgagaagcatattcatatgcaatcatacaacatacacaaatgcacactgtgagcacatttgatgattatgtaatataggtgggatgatttcaaagacagcagagaggaatcttcctcttggcctgctgaaggcttaaagcacacacttagagacctagtccttttgcttaagatttcatcagcctggtaatctgtagatttcctaatgaaagacagcacatagacttgtcttgtttgtgctctgcatgtctcagtatgaaaggatatgtttttactgtggtcaggatttgttaataaccacatgggcataattaagagagaagcatgtggctgggcgtggtggctcacccctgtaatcccagcaatttgggaggtcgaggtgggcaaatcacctgagcctgggagttcaagaccagcctaggaaacatgatgaaaccctgtctctaccaaaaaaaaaaaaaaaagaaaaagaaaaaagaaaaaaaaaattagccaggcgtggtagtgtgtgcctgtagtcccagctacttgggaggctggggcatgagaatcgcttgaacgtgggaggcagggtttgcagtgaaccacaattgtgacactgcacttcagcctgggtgacagagtgagaccacgtctaaaacaaaaaagagagagagggagaagcatgagagctgggcacccattagacatggtctagcatcttcttgagaagtgaaggggacctgagaagcttatggaaatattttcctaatttagtctttcatattggcccatctttgtgagaatttatatgtgaacatatgtcaaaatggtggcaatcatgtcaaaaataatagaaacatcttagcaggttgattatttttgtagacttacacgtagtaccttgaagacaatagaacgttatttaaaaaaaacatttggctcagtgttttgagcttatatattctgtcaataatgggtggtagagaaatcaattaactataggtctcttatacacactctatacatgttgtccttcacattaagagatgatgctatagaaataagttttcataatgtatgcacatgaagatatatgtataaatacaaattaaatattctatgcatgcatagaaataaatacttgatttcctgttaacaataataacattagtaataataataatagctataatttataagaatttgccaggcactttaattcccataactagcccatgaaataggtattgttatctcacaaatgtggaaacttagatttataagtattaaacagtttaattattcaaaatcaagacagctggttaagcagaaagattgtataaatcaaagcaaggtgtgaatgacaaaaattcacggttttattcactatattatctgcctctactttttgtagaaaggcttataatgtagaatttaatctagctgtatgaaaacaaaattttgttacttttacttgttcaatgtcctgttcttagtgccaatatttaaaattcataagatctgtgttctggtttttctctggttttggagagataactgtttgatatttcatttgattttcttactttttattttaaaataactttatttttaaatggtcaaaatgtgattctattttctttcctggaaatgctcagttttaataagtgaaatggattatagaactcagcgaatcacttaggaaaactgcttgacagttttgagcaaaccttgcgtaacttttatgaaacacctccagtcagtttgtcaggtagaatttcccaagcacagtcttttttagattccgttgattccatttttaggagagcataacagtaataaggcattatcccgcaatgtgaaagctcttctctcttttcctttttaattgaaggatcaagtattcacacagggagatatctgccacattcaatcagcatctggaccttgaggggagccctcagttcatattcctattgccatgctgcactggaaaagacaaacaaatatgtttggagcatctatattcactacacatgttatttttatgacacactaaagcattgttgtttaattcttacagtaaacacaattcttcagcgtaaatagagataccttgtattaaatttacattgtattgtacttgcattgaatttccttggttatatatgacaacctattgagcaccttaggaaatacaatttgacataacatgatgaagaggcacaaagatatatatcccagtggatatgctttatggacaattatcatccagcttccctgtgaaaattaaacaccttaaaaaccctatcattatggaaacagaaaggtgataaacttgaaactccttctgttgtacagccaatgggaattaagtatccattttgtggattatccattgaagaactgaatgtctagaactagattaaattaaactgaattaagccagaacctgaccccctttgccacatggcatgttacagttttattttgcttcagctgtcttactgattattagtgccagagaataagcaagaaaaagcctgaaaaaatacaatatggtacaatataatagagtaagtgattttttatggtgaatatttctcttttgcttttctagattcactctttttcaactctgccccgtgccctgtaaggctgaaccttcctcacagtggcaatgggcttcctctctctctggcttcctgttggtttgtccatgggcagcaacggcaaaagatgagagggtgagaggagcatggagtctcagaactcattctccctggctctctttctgcatggctctggattccagggttgcattcctccagtaaaggctacatttcctatttgaagcctctttctttctccaggttcctgaatttgttctcaccctttcctctaaaaacataaagaagtttactggctcctagccaactagttaaaatggtctaggaatcttagctagtactagctgggaatgctttattgtcactggttgctttcccttaaccctgtccgcatctttgtaaataggagttccactaaaatcttttccatgccatttgagttgtcattggtttcctgttgaaaccctgactcattcctaaattttatttaatccacatttaacacggagaggtgttttttgtgtgtgtgtgtttgtttttttgatgggggggtagtgcgtgaagataaatttaaaatgactttcttcatgctaagagtggcaagaataaataagtaaatgaacaaaatttccattttcttaaactttgtttcaatacaatagacatcttaaaggccaataagaagagccaagctcaaagattctagtggcggcttgcttatctaataaacccatcatatttaatttttcaaataataatcaacttattgatatatctttgaaagcttttcacttattgttataaaatatttctttgttatcattagtgaaataatggcttatgacatcttcctcttgatgaagtagctctgagtgccaagtttagcttataggtcagtttcggccaggcgtggtggctcaagcctgtaattccagcactttgggaggctgaggcgtgtgtatcacctggggtcaggagttcatcaggagttcaagaccagcctggccaacatggcgaaaccccgtctctactaaaaatacaaaaattatctgggcatggtggcaggtgcctgtaatcccagctactctggaggctaaggcaggagaatcacttgaacctgggaggcggaggttccagtgagccgagagtgtgccattgcactccagcctgggcaacaagaacaaaactccatctcaataaataaataaataaaattaaataaaaatcaaggtcagtttctcagataagccctattacgtatcctacccagactaggttagcatccacctctcccttctctatcccatgttttccttctatccatctgatttttaaaaagtaaactttacatcctcataatacctctaatgtctgttctttcgcttagattgaaagttttgtgaaggaagtaaccatgactgttctgacaacttctgtattaccagcatgcaacacaatgtctggctcatagtagctaccccatagttactgatgagccagatgactaccagaaaccaaatctaaatccagcagacttacaaaaattattttacagtatttagtaaatacttgtttctttgcactttctggacttcattggaaaggaatgaattttaaatgaaaagatagcatacaaatataagaaactattggctaatgacagatagtgtgccacggaggaatacagacctgcctaagcttgtttttgagagatgttagtttagtttttacaagagaagtgcagcacatgacataggtcagaattggaggagatagtctaaggtgagcttcctatagcaagtaaaactttaactcatactagaagcaaggggacagttctgtgtgtgtcccttctatgtgcacagtgcttattactaaagcacattcatatatgctcacttgtttgattctcagatcaactgtcaggccaccagggcaaggaatattaccccattttgttggtcaagaaatgaaagcttagtgagttttgctatctaaccaagttttaaaggtacgtggtcatgacagaagggctgaagtggttggaggaagatccctgaaaaagaagacaattggcttggaagcttttgactttgttttgaaatagttcccagaacaggagacgcactcaagaactaatttgttgattgaatgattacttacgtaaatgtatatgcacaaaattgatacttcaaaataattggccatacaatttatcctgttctgcaacttgctttttttctctaattcacatggagtaaacatctttttatgtcaatagcatagtgctccctcatttttcctcaaagcttagtaaaatgccattgaatgaaaccacaacatttatagaggctatctggtaaatgattaatatccattccttgctacagctacatctcattaatgccagctaaccattaattataaaagatgttgacaataaggtttggtgcttggactagtagatagtcctcaaatggattctcatttatttggatttggtatactccttgaggtagtgttgcaaggagtgtttagccaatagttatatcctgaggagtcctcaaggcctgaggagaggaccctgaactagctgttaagcctcctcctctaaaacaaagtcaaacaacagggttgaaagtcaaagaatgaaagagaaaagaaagctgatgtgcctattttaatatcagacaagactttacagtgagtagtattattagttataaaaatgtagtttcataataataaacgagttactaaaattaacatttattttttatcaaaatatactataagggcccacaaagataaataataagagagatgatatttagaacacatgtaaccatcagaaaactgtatccagaatatataaaacatgcctacacatctataacaaactggagttaacatctgaaaagtcatttcacaaaagaagaaaaattaaatgtctgataaacataagaaaatgggccaacttctgtaataatccaaaagtaaaagataatacccaaacaagataccattttttacatctaatactggcaaaaatttcaaagtctgacaataaggtctttttgaggatatagaacaatgagaactcacatggactcacatgtacactagaattgacatactttcaaaaagagatgagcattgtctagtaaaattgaacatatatcaacaattcctctccaggacatttgtcctagaaaatttgtgtatgcgcttcaagacacatatacaaaaatgtgtataattacattgatgtcatagccaaagtataaaaacattctaaatatctatcaagagtagaataaataaataacatttgccctgtaggaatactacacagtaatgaaaatgagtgaagtatggctactctcaaaaacatgtatagaacacatgaatatcatgttacacaaagcaagatgaaaaaattatatatacaacataactctattaatataagttagaaaaccatgagaaacttaattatgttgttaagggatgcatttctcagtagaaaagcaaggacatggttcttcaaaagtcctcatatttatctgtgaggaagggaaagggatccaattatggacaggagatttctggggtgctggcaacattctattttttcaacgtgagtgatggttacatggccttttgcttttaaatttgtcattaaaatagaattgatattgtatatatttttatatgttatgttttattacgtgatttttaaaatgtagaaagaataggtatatggaagccgtaaagttgtatgcactgtagagtctgaatgcttcagtgccgacacatagctctaccacttcctagctgtataacactggccaagttaccaaacctctctaaaagcttttcttgtcatctatttctctcatctaaaatagaacccattccactatcaagagtttttcctgaagattaaatagtacttgattaaaacgctcaatccagtgattattgctttagcataaacttctttggactttaaagtgtttgtgtcttcttacctggcatgctcccctgcacaacagtattttttaatttaaatattttattttgagataattacagattcacaagaaattacaagagacagagattccatgtatctttaattcagtttctcccaatgtcaacatcttctaaaactataatacaatatcacaactaagattttaactctgatataatcaagacacagaacaattccatcacaagacatggtttcttcttatcctcacactgaaaaacaattccctttttaaccaggaacagaagggtaagttagtactttggaagtaggcttttatgagattaacgtcattgttcatgtttgataaaggaacactcttttctgaatagtgattttatcataccatattgcaatctaacacattccatccctaagtgtcacaagttttttttttaattaaaaagaaagtatatataactgctaaagatatttcttctgccacagactactgctgaaatgcagcattcccacatccctgcctcattcacgactacttcctatacattcaggaaaagacgtctttaataattatttttcctgtttgatatttttaaccatctcactgttactacctgcatgggcttccctactccagtctattttacatgtgattctagattattttttctgtatatgactttatcttgtcgctagtcagttcataaaaacactaatggtctcctgtgcatcataaaatcccaactccttgtagtgtcattcaaggccccaaattccctttgaagttttgttttctattagactttatcgagtgatatggtttggctctgtgtccccacccaaatctcaccttgaattgtgaaaatccccatgtgtcatgggagagaccccgtgggaagtaattgaactatggggggcatgtttttcccatgctgttctcctgatagtgaataagtctcatgagatctaatggttttataaaggggagttccctgcaaaagctgtcttacctgctgccatgtaaaacatccctttgctcctcctccaccttctgccatgattaggaggcctccctagccatgtggaactggggagtccattaaatctctttcctttataaattacccagtctcaggtatgtctttattattagcatgagaagggactaatacatccagctacaggaataacaacagattattgatctatttgggatacctttactgaaccttgcactttcttacttctaggcagtggcaaatgtcattttcctcaccagaagcatcttcctgagacataggtatttcacatattacctttcatgggagacttagcttcatcatatgacttattgaagtccccactaccgtatgtggaagacttgactgctctaaaaagcctgtaacacttctttagccagagtgattattccctgctagagggtcctgtacctactgtctactatttaattatgtcatttgtttggcataaagttgttgtggtgcttatgatccttgtttaacccttgaattgttatttaattatacctatgtttaactcttttcttacttccataaaggtagatattattcttattctgttcttacttcccaaaataccaagtatagtactttgcacttgattgactttcaatatatttatattaatctttttattaggcttatcttgattgctttgagaaccagagcatgttcaccagttcttaattcaagtgaaattcctaaaaattttagaagaggaaattagaccagaaacatataacaagagtagtgaccagagtggggtaagatggccagtttccacaactaaatttatatttgtatggccctgtaaaatgggttagcccctctaagaatccattccctcctctttacagcaatgacaacaacaattcttattttttggagttgtcagtgttaaagaaaataatgcataaaagcatgtaccctattgtctgtctcaaagtaagtgatcagaacattttaattttcttttttaagaaaggctctcactttgtcacccaggctggagtgcagtggtgcaatcatggcccactgcagcctcgacctcctgggcctgagtgattctgccacgtcagcctctcaaatagccaggaccacaggcacatgtcatcatgcccaactaactttttgcattttttgtagagacagggctttgccacattgctcaggctggtctcgaactcctagactcaagcgattcacttgccttggcttctcaaaatgctgggattataggcatgagccaccatgcttggcctgagcatattttaaattactttaaattattttgggctggtggcagtggctcatgcctgtaatctcaacactttgggagactgaggagggtggatcacaaggtcaggagttcgagactagcctggccaatacagtgaaatcccgtctctactgaaaacacaaaaattagttgggcgtgatggcgggcacctataatcccagctacttgggaggctgaggcaagggaatcgcttaattcgcctcctgggaggcggaggttgcagtgagccgagatcatgccactgtactccagcctaggctacagagatagactccatctccaaaaaaattaattaattaatttaaaaaattattttaagtattctataattttgaaaatacttacatggcatttcaaggactcaaaatcttactttccccagagctactcataaatcaaaactttgtttaaaataaatgaaaacagaggtacaacataccaaaatctctgggatgtagcaaagacagtgttaagaggaatgtttattgtgctaaatagctacctcaaaaagttagaaagatctcagtttaacaaactaacatctcacctagaagaacaaactaaactcgaagctagcaaagattttttttattactgattcaattttcgaacttgacattggtctgttaagggttttaatttcttcctgattcattctttggaagttgtttgtttctaagaattttctctgtattttctagtttgtgtacatagaggtgtttataatagtctctgaggatgtgttttgcttgtttgttgttgttgtttttggtaggaactgcctcccctaccccgccgaaaaaaaagaaaaaaaaaaaaactggaccaggtggattcacacccaaattccaccagatgtacaaggaagagttggtaatgattctactaaaactgttacaaaatatcaagaaggaaggactccttcttaacactttctatgaggccagcatctctctgatagcaaaacttgtcaaagacacaactaaaaaaggaaactacaggccaatattcctgataaacatagacacaaaagtcctcaacaaaatactagcaaaccaaattcaacagcacagcaaaaagttaattcaacacaatcaagtaggcttcattcctaggatgccaagtttggctaaacatatacaaatcaataaatgtattcataaatctccttgagttggaaatatatttaaaaacatgattcatcatataaatagaactaaaagcaaaaatcacacgatcatctcaatagatacagaaaaagctttcaataaaatccaatataccttcatgataaaagccctcaacaaagtaggcatcaaaagaacatacttcaaaataataagagctatctatgacaaacccacagccaacatcacacagagcaggtagaagctggaagcattctatctgagaacaggaacaagataagaatgcccactctcaccactcttactcaacatagttctggaagtccttgccagagcaatcaggcacaagaaagaaataaaagaaatcctactaggaaaagaagaagtaaaactatctttctttgctgatatgattttatgcctacaaaacccaaaagattccaccagaaagttcctggaactgacaaacaacatcagtaaagttttaggatactaaatcaatgtgtaaaaatgagtagcatttctatacaccaataatgttcaaactgagagccaaatcaagaatgcaatctcatttacaatagccacaaaacagtaaattcctaggcatacatccatccaagaaggtgaaagatgtctacaaggagaactagaaaacactggtaaaagaaatcgtgtatggcacaaatggaaaaatgttccatgctcatgaagtggaagaatcaataatcactaaaatggccatagtgcccaaagcaatttacagattcaatgctatttctatcaaactaccaatatcatttttcacagaattaggaaaaagctattctaaaattcatatggaacccaaaaagagcccaaaaagagccaaagcaattctacacaaaaagaacaaagctggaggcatcacattactcaacttcaaactatactataaggctacagtaaccaaaacaacatgatactggtacaaaaacagacacatagaccaatggaacagaaaagagaatctagaaatacagctgtgcacctacagctatctgatcttttacaaagtcaacaaaaataatcaatggagaaaggactgcctattttaaaaatggtgctggggtagcttgctagccttatgcagcaaaccagacccctacttttcatcatatacaaaaactagctcaagatggattaaagatttaaatataagatctcatattataagaatcctagaggaaaacttaggaaacaccattctggatgttgtccttgggaaagaacttatgaccaagtcctcaaaagcaattgcaacaaaaattgacaagataaacctaattaaactaaagagcttcagcacagcaaaataaactatcaacagagtaaacagacaaattacagagtgggagaaaatattcacaaaccatccatttgacaaaggtcaaatatccagaatctataagaaacttaaatcaacaagtaaaaaacaaataacctcattaaaaagtgggtaaaagacatgaacagacacttctcaaaagaaggcagacaaacagctaacaaacatgctcaacatcactaatcatcagagaattgcatatcaaaaccacaacgagtaccatctcacaccagtcagaatgactgctattaaaaagtcaaaaaacaacagatgctggcgaggctgcaaagaaaagggttgaatgcttatatactgttggtgggaatgtaaattagttcggccactgtggaaagcagttgaaggtttttcaaagaacttaaaacagaaccaccatttgacccagcaacccattactgggtatgtacccaaaggaaaacaaatcattctaccaaaagaaacatgcactcgtgtgttcatcacagtactagtcacaagagcaaagacatggaatcagcctaggtgcccatcaacagtgggttgaatgaaaaaatatgatacatatacactacgaaatactatacaaccacagaaaaaaccctgaaatcatgtcttttgcagcaacatctatgaagctggaggcttttgtactaagcaaattaatacaagaacaaaaaaacaaatattgcatattctcatttataagtgggagctaaacattgggtattcatggacataaagatgacaatagaccctgaggattaatggcagggaatggggagtaaggactgaaaatctaactgttgggtactatgctcactatctgggtgatgggatcattcacatcccaaacctcagcatcacacaatatacccatgtcagaaacctgcacatgaacccccgaatctaaaataaaagttggaaaaaacagctattgatacatgtcctgtgttctagttaaagaaaaaagcatcttcttaggcttcagtttaaaatgtccactacattatatttgttagtttttgttactctgtttaggaatctgaggtcaatgaagttaaaattgtcatgttaataggtgttttagacttaccgcttattaaaagtatgttttaaagctgaatcatacagtgttttatattatattgattttgtttatattgaaatcagcttaatatgatgtgtgtgtgtgtatcaatataatactagtcctacagtgtggttccacaattcatccttcagcccttcctccatatgctgtcaaatactgtttacctacaggatgccgggtaactctgtgtttgtgtgtgtgtgtgtgtgtgtgtgtgtgtgatctcacctatgttaaagttagacttcattctcatccacctctcaattagatacatcctggatactaaaaagtttttgagcagttgaattaactgtcacaaatatcacttaatttcattctcagcttatttgccatgtattcatcttagtctaagcccttctttcaataactgtctgctcttcctatatccatagttccagatgtcaaggttatctagcttctcaacatagattgctaagggttgacttactagagtcagatagacaaaaaaaaaaaaaaaaaagaagaagaagaagaagtaaatttggagaaactgtcactgagagaggatgtagaagaactcaaacaatgacacaagaattggtaaggtgcagtcactgagtgatgtttagggtaaaagctgggtaagaaccctgtatctcatcaatcactgaagcattatagaattagagaatgtagtctttggtgtccataatcaaagtttcagtcttcacaaaatgattcaattatattcattatattctgtgtgagaagacaggtaagtgtgtagaacttactagaaggatttccttcaaaagtggttaagatttttagagttcatacttaaggggatgagatttagtttcaatgaaaattaacttctataaaatatctcatttcccaatatgtcagataaatgagatattatgcacataatcctaacataaaagacattctctgttccccaattatgtaagaaaagggaactattgatttaggtactttgtatctcagttaaaaagcaggtcaaataggtagcatttcaagggtcttatggtttctttaagagattctgtaacacactatttgtacataagatttttttaggatcaactgactgcttcacagagagcctgacatgtaagaattttttggtcattgttattacctgatcatatcttttttccctttaaattttctatgtattataggtaggtggtgttttcactatgtgtctttcacttcttagctttaactcatttgtgtctttgtgtgtcaagtactacatagaattaaatcaaataccttccataggtattcataaagttaccatagatggtcacaccagaaataaagaaaaacagatactggcagccacatctttttgtgtgtttagagctataagtggtacctgagagtaaaataaaagatctttcccaaaaatttggaaataagggaaatggacttatcagaatggtaaactatacaaggttgtcttcttaaaggaaaatgaatcacagcagtggctttttaaaagtattaactcatttaacaaaaaatgctttaatcctaaatgaatgtattgtcctagatctgattggtataagagaaaacatttcagatattcaaaacagagggtattttatacaagtaggttgttctcaaggtgttgtaaagaagggctggaagaacaaaagggaaaggtggcaggtactggatggaagaaaaggatgattgacaggagctggtgcttactgctacacttgccgatttgacatttgaaccattatgggacgctgccccaaccagagctgaaatgccaacaacattccactaccgaagaggcagaaaatgcagaagagatgcttcttctgtctggaatgcttgaggctgcaggtgctttgtcccctgctgacacagcagctgtcaacaaagccctcagctcttggagctagaaactggacgttttctttcttcctgcttctgtcctcctcacagtgcctcccactggcaaaacccaatagaaggccaacaagcaagagagttggaaatgtagtttgtagtttgtaggttcagccgtacagaacaggctatagaagcgtggatgtgtagctggggcggacgtcagatgaatcaccttcttagctactcggcattcacacacacccttgtacttttcaccacctttcattaccaatagcaatcactctatgcttccaatgaacatgatactactatgctttgtacaaatgacggtgctctcacctccctcatcacattcttatctgggtgatgttaattccccttttagttcaggcacaacccatctggatattcttcaacataaaaaaactaaactataaattaatacccactaaccctatttacatgaatcaatggggaaaggaggacggaaaattggctacaatatacaaatctctgtgtcataagcagaaataaaatatgatagcatttataattcttgtttatataattagttgtgagaccatagctgatatttacaacttcttctctttgccctcagctggtagttcatttgtttgtagttcttttatttttattttttgtagagatagggtctctctatgttgcccaggctggtcttgaactttggggctcaagtggtccttctgctttggcctcccaaagtgttgggattacaggtatgagtcaccacacccggcttatttggaattttttacttaggccactggatcttcattactaagggggtctatgtccttcctgttctatcttgattgggttgctgcagattttcaatgcttatatgattggacctggtcatataaagagatgcccttttgaatgtcctgactgacaatgtgcagtaggaagccagtttctcctccaatatgataccttttctctttgcctgttataggaatgctatgaagagagggttaaaaagaagccaatgtgtaccaggtgcttagaacagtgcctgatacattatgagtcatatagaatgcattaacaaataaggtcgatttacttctggggcatatctattaagaatatcttcttttagaaagcaatacaaattataagtatgcttcacttattaatttttgatctggaacacacatgacaacagttaacaggatgcaatagaaagattctcatgctggaactgttgggttctatttctgtctctgtattaattaggtttacagtttgatattcaagggtaacatctattttatcctttggtaagagacagagtttagacaaggagaaataccagagtctgtgatttaatgattccatgaaactagaaatcacatcaagagtgcttgctttcttaagaccttctttgctattgtctagtagtcatactgaaaggcaattattatcttcccaggtgttatcacgagttatggattatatctagatggtatattaatccacaattcctcagaactcagctatcgtgcttacggatttgctccttggagtttacattccttcagagtccaagcatgcacggccaaaggttgtgctctgggcccactggtgagtatctaaatttacattctaggaatgtgttaaatgtcagatgacactgaatattaaggaagaagtaagtggcggtgactcaccctctgcacagctagcctttcaagcaggatgggagatttttctttttataaaagttcatttaagagttactaagattttatattcgacataaatttcaagactgaacataggtccagtgaagggcagagtctacattttattgaaagaaagataagttggctagtgtagtaggcaaacatgaaatttttcctaatttagtgacatattgaaggcagatgtttttctttctaatcatgggctcaacatctaagtaagtttaagattaagaagtaaaaataattgaaagtccataagtgccacaatatggcaacactgctccccaaaaagtaatcaattaaaaggttgagtttacctcatctgttaggataaaatagtttcatgtgatacagcttcataagaatggtatttaaaattacatcaatatcagcttttgatattcatatttcagaaatctatatctgaaatgtatatctatatttcattagcagttaacagcttgacaagattatgttttctattcctaatataatttttcaaacccaattaatagcacttaattatcataaactagcaggacagtcttcagtttcaaaacatcacattacactttggtgcatttttcttgattaattagattttgcttctttagatggaaatgctcattagtcttagatattttttggcaatgtttgctaatgccctatcattttagtgcatgctgtcttcactgaagagtatattatataaatattaccttggaagacagctctatgttttaatttctgcttccttatttttgatcacacctctctttttgtttcagagattggttgctttccaagcagctaacaccatccatcggcggagctgagctgtagtctttattgccattaagcattttatagcccagacccctctgatggatacttacccttaaatgcaggaatggcaataggccagcttttcttatccattcaaaaaaaaaaaaagaaaaagaaacaaaagaacacgtcacatgagattgaaatttacactttttgaaaatgtaagctgcaaatggtagttctggctacaaaattggctcagcggtgtctcctgatgttctggcaactttaaataagggggacctgcattatcaacctgcatcctgcacagacagtagctacgttaaccttaagaaatcaaatgccacaaagctctgataggaaggggggaatagaattgggttgtaaaacctagtctgccatggcttcattcattccagactcaatcctgacttacagcacagagttattttctcccttggtacttttctttatgctgtactcagtatgcaaacgcttttccctagtcaatgatccatctctaatcactgggattgaagagcaatgtctttatttagaacaagtcaactatatgctaccaagaagttaaagcccatggtcttcaactggtttgtgaaatatttttgtgcccattaagtgattccatatctgagtattctaaatagccctggatggctagcacaatcatgaaggatattacagattcagcttctttttgttgatgattcttttaatgtgtccttattgacttaagaaatctatgaatcaatcttaaaaggcagagttttctatcattaaattatgatgtgatactcaacaaaattcagtcaaacgtggcaatggtgtacaacggtttcttaagatattcatctaaatagagcccgatgctatgacattttaaataaaaaatttcattgaaacagaaaatttatcatttctatttttaaatattttgctggcagaaatcagaataaattttgaaagagttcaatttttttgttcatctaatatttcttaatgataattcttgttctttagattatccacacatgcagggaaatactattcaatgttttctatgaggaatatgcttcacagtcccaaatatgatatggttcatcctccaaattgcaaattgttcatataataaaaaatatgaatttgatggagaatttttaaaaataaaaagacatacagaagttccatattcttaccacttgaatgtagtattagctcatttttttttctaatctgaccagtttgttagctattatttatggttcagaaggagttgccctgtacctatctggaaaaaacaaaaacaaaacaaaataaacagcagcaacaacagcaacaaaaaaaacccacaatgattctcctgtggtttttttcagttcttactcaaccaaataatgtatttgactcttatggaaatttcaatatagaaaacaattgacaaagcctttgaacctaatttttagatgctaatgtgcattgtcaagttaaattcaataaattggggttttataaattttgaaataacataaaaattaacagaatgcagcaggaactttttaaatgctttccttgctttcaattgtattagagggaaacccttcacattttgtaatattctttaataaaatacaataatgttttccataagaaaatcactttgctttcttactccccacttagccaatgttacataacactagtggagtctaagattgagaattttatgactgtgtcttgtattgtaacattcattggatcgattctccagggactcttaaggatgatatgcgagactataggtcattgctatgtgatatggctaaaaagttgtcttggttccttagtgatgtcatacttatacagataaatacacctggataaatacacatgtacaaacacattcaccctttcacattttttttttttgcaaagaagcaaataagtgtgttatttaagacatctaaatcttaatggcaatatataatatagtcaagcaaacgctataggggaagtctgccttcaacctgcttaaaccccttaaatccctatacccccttaggagatatacttattctacaaagcctcagatttctcaactattacaaagagaaataatgtctactttaagagagttggtgtaaaaaattaaatataacttacacaaatttctggcgcattgcaagagttttattaagaataacagtttatggccaggcatggtggctcacacctgtaatcccagcatgttgggaggtcaaagtgggtggatcacaaggtcaggagttcgagaccagcctggccaatatgatgaaaccccatctctactaaaaatacaaaagttagctggatgtggtggcgggcgcctgcagtctcagctactccggaggctgaggcaggaaaatagcttgaacctgggaagtggggattccagtgacccgagattgtgccactgcactccagccttggagacagagtgagactccatttaaaaacaaacaaaagaattacaatgtattaaagtgtttgtatgttttattgcacatttgctctcaaatattttttctgtgtcaagagaggttcccaggccaaagccaagccaacttttacctttcccaagtgccttttccacatattccttttacagcaaggtagataaacaaaaaagtaaaatgaaaaagaaagaccaggtcagagcaaaatagtacaattgccaaattcaatgtatagtaaaaactgaagtgtttatccaaatatttaaggaaatgttacaaaacatatttattttgaattaaccaaatatttgaggattataatataattatctggaattgcccttaattcttcaacttttcaagtctcattttatttggaatgctttaaaatcattctatgtacaataatatgaactatatagataggcataataaaacaaattacattgtcataaaatattaaaatgatgaattgatatttttctggcctagtttcatcatttttgtatgtagctattaaactaaaaacgaaagagcaagtgttatagttctaaagaatcccatagcttttctctgatgaaaataaaacatgttgtgacctcatagttattaaaaattaacactttctttttcacatttattttcataattgataaggtataatcaccctaacaaataaaggttttctaattgataatatttctgcctaaggatttcatgtttgatcacctccttgggaggcaagagcttgtaccttaagaataaagttgaaattatcacatatttagtaaattgtgaaaggtcaaatatctatgagtgatgctgatgagtttgtagtgattagttaactgaatttaagctaatgattaaaagatattaaaaatttctgaactcttttctactttcttgccaactacatcttcctctgaccacttattttacttatttatctattgaaatcttcctgaccccggtacagctagggattgcattttatttcagagtctttctcttcaaataattcatcttttgctcttttctgcatagcttcattaacacaatcaatatttttttgtgattgtgccttagggatagagtccctaggatgcatgtatttcttaatgttagcatgatgccatttttacataactgatagcaacatagctcataaaaattttgcgtgtgtgtgcgtgcatgcctgtacacacatgtatgcatgcgtgtgtgtgtgtgtgtgtgtgtgtgtgtgtgtgtgtgtgacagagaagagagagagtcaagatatgtggtgtagctttttgacagaggccagaagtctaccacctaagtcaaggacttataaaaacagactgcgtgcatttcttctcttttgcaatcacataaaaattattttaaagcagtcctagaattggtctatggatatgtacagccataggcacagtcacagtgtgagcagatccacatattctggaaatcacaaatagctgccttggtcaagagctcaaattctaagctttaacagcagggggaagaaaacatgaggtgtgctttgatcctgctgacaaaatgaggtattcatacaagatgctactgtcaaaatagtttacttcacagcaaaaagagattctttgaagaaatatgctcaaagcgaagcatgtacttattttatttgcaaacaaaaataaatctttttatactcacaggtggaaaatcgaactctagaagctcctcctgaaggaacagtaaatgtgtttgtcaaaacacagggatcccggaaagcccacgtgaggtgggaagcaccttttcgccctaatggactcttaacacactcagtccttttcactgggatattctatgtagacccaggtaatttgtttttattttctaaactttaaataacattagaaaacaactcatttttatttaaaatctttcttttggctaaaatctttcttttagccacagatgttggtttctttattttcctgaaaataacctatacggataagctactgcccgacggttctcagaatgtggttcccagagcagcagcaacagccacatctgatgaacgcttagaaatgtacgttgtagagcttctgccccagcctagtgaatcagaaactctagaggctaaggtctaacagtctgtgtttaagcaaaccctttaggtgacacatgctgaagaactagtatatactcttcttcccttgctaaaaagtggttcaaacctaaaacatcgtgtatgcaaagagttgaactataattttgcagtccatcttaaacaagccatttttgtgactgttttagatttctgaactatcttagtaattctgctgtgtgttctgataaatttactgaatgtggattaggctacatggggttccttgaaagtattttcaaaaactatctgattcaataagttaggtgctatggtagcatgatgtttattttaagcaaactctaccataaaaagagcaggtatatattttaatagaaactttggatctgtattaagtgctgttgtttatcatcttccaggagtggccttactatttttgtaggaggaagtttgaacctttatttttaaatgagtagcaaatatgcaatatcgtggattcagtcagacatgttattagcatgttagtctgttgcttaggcttgaaaacgtttctttgtttctgaattttctatgagtctttgtaatacttaataacatcctccaagtgtaaaaacaggtgaagaaagaaaaaaacaggcttttctaaatttgaaaagggtggttatttgtgtactgcactggcaagcaaatgcgagtcaagtgcgtgtcagagtctaagctgatcccctcaaagattggtgtgtcccttttttatgcaatcagggctttcatgtattctgctgtaaagcacttgtaagattatgaggtgaaggagtgatgatcgatttgaaaaaagaagcaacatttaggccggacccatgacagcccagctatttccgccaaggcagctgggtgaataatgcaagagccatattccccctcgtgtttaatcttgcattgtttttgcagagaaaatttctgcttgccttctaagtcatgtcatcttcagttgtcatcccgtctctcaaaccatcaaaacggtattaaatgttgcaaagctgcgcggcaagagaactttcaaaagtcagaacccatttaccgaacagcccttgtagaaaatgtattctgttctcggcagaattttccttcagttctttccactgagaagtttactgatttctcccagtggaatctgctggaatttatcggttcatggttggcagtcacagattaaggtaaatgtcgatccgtaatgaccctctacatgttagtattgcagtaaagctgggcttttatgtcaaagatatcggagagggagctattacacatgacaggggtgatcaagggactccagaccaaggcaagcattattaaatattgactagttctgtgatttatgtagagctggaggaaaaaagtgactttttaaccattatatattcttcagcaacgaaaaccagccatttatctcctgctggtaataaagaacagagtgcctgcatattttagtggagggaaaacctggtcttataaatgagatgaactccttcgtgataacatttcagtttgttaattgccaaaagcaaaacagacaaattggaagcaattacgagatttgacttaaagaatttttgcggtacgggttcaactcaggggttggaaaggggtgaggttggaagcaaaaggagcatctgagatgggccccaggaaaattcgtgtcattggttcactggcactggaactctcatgtccactgttaactgaaaggattttgaatattgtcttgtcctgtcacccatcagcagctgggtgacatttacactgagggtagggaggtctgcatggctctacaagaacaaattaaacattaattcatcaaacttatttaagatatcatctgttcactagatttatacaaagcttattgaattgtctaatggctaattggttatttccttgacataatgaacaactgtatttcatcctttcctgtgatggctgctaaagagggggtggttagaatttataagatagggaaattcagctagttcaaagcaagtgtagtttcaacataaaagtgcctgcagctgggtcactattttgcaggagaaattgggctgtgtctgtaagacaccctcatgggaaccctattcttcatgtcaactcgtatcctgaactaaaaactttacaaaaacattaggtttcgtaacaacaagtgaagtggcacgtatcaaagtgtgatttttcttaaaaattgttcacttttgaccacgtattatgttctcatgaatcaaaatttaaaagatagaaaaaaaggaagtaaagtaccaagcctgttctgcagtctcagaggaaaagtagtgtgctcagcttcttatatccttctagaaatatttgtcttataggtgtgtgtgtgtgtgtgtatacataaacaaacacatatttcccccatttgtaaatacatatagttttcatctcacacatgcaacattttatactaatgataccaagtggtacacattattttgcaccatgctttttttccatcttaataatttcagagaaattatcacagcaattcctaacgagcttcctcattctttatatagcttggtaatattcaacgggttagagcataccatcattggtttaaccagttccttattaatggccatttaatttgtttctaatcttttattatttcaaataatgcctcaatgaataaacatatgggaatgtcctttcacactttgcaagtaaattaatacgataaattccttgaaatgaattgccaggtcaaggaaaaatgaatttgtaactttgtaagatactgtcaaatttcattccatagagaccatataatttatattctcagaaaaagtatgagggtgcctgtctccccacagtcttgtcatcagagtgttgtcagacttatctttgccaattcgatatgttaaaaatggtagctatttcacagtatcttgagtagttattaggaattagttggaacttatgaacatattttcttaagtttaaaaactgtgtttcttttttttgtgaatgcttcatttgtatcttttgcccacatttttacagaggtttaagaagttctttatatattaggaaaatctgttatattagtagaaatttttcccttcattattgctttttcctagcactctactgctttcttttataaaatatttatattcagttcatctgaaatttatactgatataatatgtcatgtatgggtcaaaccttattttcttcccagaaaattttcctttctctcaaaaccatttactgaataatccttattgttccccactggcttgggttgtcatctccaagagctcctaaatttccatctttattaataaatacgtgtggacatatctgtacctttatttacattatcaaggtatcttaatgattaaaactgtagaatatattttattgccttgtagatctagtcctcttcattatttttattttatataatttcctacttattatttcatatttatttttttcaaacaatatttatatatttctaattttaccccagaagtcctgatgctgtttttataaggatggaacagaatttacaggtgacttaggtagaattaatatctttatactgtcgggtttttctgatcaatgatatcattatactttctattttgtgtcttttgtgtctctcgcaagagctcaaagttttcttcatatagatcttgcatatttctgttgtgtattcattaatattttataattatacatgatttaagtaattatgataatatatacattttacatattaacattaaaattaaataactgaaaagagctactttcaataattatatgtagacttcactcgcagatacctgtcttctgaaagccacgattttaaatgtttatatctattagatgatcgttcatctaacttttacaaatatttgaagtttttttgctgctaagattattgtcattttctctaaaatgcaggcatcttaccaggggaaaatgataatctaattaattagactctcaactagtttgtggtgtgtaaaatggcaacaaaggttggacctgaagaatctctgtcctgacagaatttacaaataaaaaagctaaggcagacaaacttagccaagttattctcaagtgcatgaggcaggaaagaaactagatggtgtgacaagtggaacagaaataattaagggaagattttggtaatactgggtctttctctttaattatggatgagaataaactgaatatggaaaaactaaagagaatgacggagagagcacaaacacatgtgaatggcaaaaattaacagatcaaccaacctacacttggttatattagaatgtatttttgccatttgctaacatccaccataaaagtaaggattagcacttttctatgggattctacctgatttgaaacatctattcaattatgaggaacatatgatcaacaaattagtttttctagggtgtgcaagtgccatttactgacctggaataagtgctttgctcaatgactctcaagggtgcaccattcaccttgcacaggtgaatagtcaactcccagtgatcactttacaacatcttcagtattttttcacacatatgaattaactatcaatttaaattatagataacaggtttataatcattccttgtgaaacatattgaatatataatttttaaaaaataaaacaaatgtgtaagtttgggaatacaaataaaactttacagcatagtagtagcaacctggcttatgtaaaactatttataaaattataaattctattccatttaactggtagatgaaagtattgtgccatgataatttagggttacatcattattttacagagcttcaaaagtattctcagctacaaatataaaacaacctaattgtcaagaagaaaaataaaaactatgaaaagataaagaaaatattctgagatcctatagaataatttttacaaatggcagcttctttactactagacttcccttggattcttcacactgatcctgtacttagtagacaatgccatgtcttagtacacatatcctgcttttttcttaagtggttattgtggagtcctctgcgaattgtttaattcttcattatccttccttttgaatgaattgggacgtgatcttcattgcttgatatcctgacagattgctttgtgtcagagtttctaaggcaaggcaccagcgtgtgctaattgctgagtcctttgtgcactgttaactctcacctgctctgaaaaactggattgcagcttagttttcatcttcaaatgtctctttctcctaatcccctattttgtgctgtgccacagaataaagatatttatttgaaaaagagagatatggattactgtgggggaaaaaagagggtaaatgaaaatgatccttaagcattagcaaagggaaatggcattttagaaaaacaaaagaaaagcaaagcagaatgatcagtttttaatgttgaaactgaatcatttcatggatctcagataactctttctgaatgtggagaggtacaacaaacaggttttaggtgacttttcccagagtaaatatgtctaatccaaaataagtcctcaaaagtaagggtggaaggtaaggaccgggaaagaaaggaaatggaagatagaaagaacaatttttaaattgttaaatgctcatgaaatgagcataatcagatgctttttatttgcttataagacctgatggtcctgaaaaaaagaaacccaattagtatttaagaatgtttttaaaaaggcaaatgaaaatttgggaaatatatctgttatctctaggtggttatattatgaatggtttgtcttcccatttttccttttatatgtactcaacttaaaaaaaattctataatatatacatattatttttgcaaaacattataaaaaatagctcacaagagcagatgattcaagagcagagtaatttggagtaagcatggtgcttctggctccaaggaggagatccgggtggtgagtcagaagtcctaaggtggaagcttacagaaagaagggcatcttcacatatttccaatgattattcaggaaaagtcttttggtgacttgtgggatgttaaatttaactttcttcttatgttttggctgcatatgtttttccaacagttgctaggggtaatcaaacaaaaacaccaaggattctgcaaaacagaaaagaaaactaaataggagtggtcagagaaataaaagagcctctttatacctgagacataatggtagtgttaggggaggactgaggcatgggagatttggtttttttgaggttacattgtggggatcaggaggggcataaagtttttactgcagtggtaacatctggaaggagtggggtgccttaaagaccgattaggatatttccaggtagaaaagatagagtataaatgtgatggctccccatcccccattctctgagcctaaactttttcttctgttataattggagtccatatctcatttcaatattggtatcaagtgtttgctctttgggataaatccccatctaaaaacaaaagaaattaaaggggaacggaaactgcagaaatgcagaaagtatttcattgctggtttaaactagatgaaagtgtatttttaactacagttccgaaaaatcctagcacccagaataggcttaccttctcctggaattgccagttaccagaaagagtgctttagaatgtcagtatattcaaatgctctaaatctctaaaaaatcttgaaaaaccaaagaaatgcagttgatttttcaaggttacccagagaaatccagtgtccttttcacacactctggttctctgggtgcttttctccccagaatatactgtgttttataaaaattacaagatggaaaaaaaatatacagaagcgtttattttcttgagaaggtaaggaaaataattatatgtgggaacctcttagacttccaaagagtctgtaggaaggctaatgctgttaggaaagggacagctttgttttatagtccctggtatctgttttttagtgtggagggaaatctgcggtttcagagctgtgcttgcaacccatgcagtatatctgacacgctgccctctgggaaaacccgccagtgggggaattgttccagtgatgcagtacagcttgtaacttggaatcccgtcggagaactttgtagttgcttgtcagtcagtgggaagataaaagaggcagcttcttttcaagcaatctgaattcattttcccgtaatgagttagggggtcaggcagcaggagtgagttcacctgagatcttataaagtatatttcctggtggaagaaagagaggaggagaaaagggaacataacgtccaccacgcagctgtagaacggcgtaatgtggcttgtcgttggtctatttctttttatgcccacatattctgatttcagagcatatatttttagaaagaaaggtcaaagaaagtacagctttatctcatttaaaaatataaaacccaatctgtgaaaattgaaacccagttaaagtctaaagcagcaagtgatagtgtttcatacacaaatactcatcaagcaacaacatgttaaagatattgtactatgtcttctgacattacatcattattaaccacacaatttattttagagacttagaagaaattaaatgagtgtcatgataaggagttcttttagttacagacaacagccccagacctctcttcctgaccatttcagatgttgtttctaaatcagcacaaaagatattaggaataaaaactgtgggagaatgttcttatggtcaaagcaagtattaatataaaaaacattgggaatgtaggggaaatagagaaaattactctgtttctatttgtttggaagcaaatgtctcttatgcaaaaaagaaagtatagttattatatctttctgtaagtttccaacacatttctggatgtataaatacatacaaatctaaacacttgggaaatcaaaaggcattttttctggactacaaattatggccatattgttaatgaaaatataaacgggcaataataagatatctgtcatttcaaatattgggctatagaatgtatatgcactgaatgtattgacacttctgattgtatatcatgtcatggccaataaagctatagaaatgtttaattaggacatattcttccacaagaatggagttaagcattaatttatcaaacttgtttaagacctcatctgttctcaacactcacacagcagcttattgaatttgtctgatatctaattggctattttcttgacataatgaacaagtgcatactctatgctgttgtgtctgttgaggcggcgatgtaatgatgaaatggaaattgtaaccatgggtcgtacactgattcaggatatgcagcccacagagccatgagagggcacaggatttcattgtcctcatggcttaactttatgtttcaaactctgcagagcatctctgtggaggaatctctccattctaactcctcatgaaaggagcctgttagaagcaaaatacaatcagcagatcacccagatgatgtacctttggctttggaaggctttgcataatttaaaaaataaaataaaattctcctatttagagaaatttttaaagcatttaaaaatactcacaccattttcaaacccacaccacaagtgatttgggggatttctaatacatgcatgataaagttcaactggataagccagccgtggggcagatatataatgtttacctatagttgtgtaccactgatatgcctgtctagtgttggtttttgcatgctttgttgtggcaagagttcagtgcttgttgaataaatagtaatattagaatcagtgtttagattttggtagactgaacatatagccattttacctaggaggttctcagtaggaaagtgtcagctgtgaattgatgttagagggaaacagaagaatggattacacagagaaatagaaaaaaaatctagccatctggggccaatgtccttctctagcctctaagacacaccctacagcaaggaattcccttctctgattcctgaacttctcctgtgggaatctagggatcaacttccttggatggtgatgggtccttatcattatacagagttatgaggattacaaaccatatgtttggccccttagaaagtgataataggtgactcctaaatcatagttctatataccaagaacagcccacatcaaacatatttcccaaatttttgtgtgaaattcttcataatcaatgtgttactttactcaattattagtgttgcagaatctaaggattctagtgggctatttatgaaaaaaaaagtatatggcttttagagaatttggattctttatttataaatcgggttgcaaataaaatttatgtttttccttctagcaatatgcctttggggagaagcaaagggagttttacacccaagaagcagaaatcaaaaatcatagaattaaattaagaaatttatttgtttatttggacattcattcatttgttcatgtagaaagcatgtatctagcttgttttatggaacaagacagaaactaaatgatagctgctggagttgagtagagaaattttctctatccagagttgaatcatatgttgttttattgtgctaaatttgttagacatttaaatttatacgaatgatggtgcctgtttctgggatatttattccttcccattgtaaacctatttctccaaatcatcactatgctaacttaatcactatgctttcaacatctgaaacatttagaaagtacttaaatatctggcaagcatggtctgtgtgctgaaggggcttgtggtttaacaaggggagctagaaattacccaagtaatcatatagaaatataaaattacagactttaataattattaaagtaaaagtatatataactaagattttcataataagaagcttaatataaattggagggtcaagaaagtttctttgagctgatgacatttagggtaactgtaacatgactagacaccaactcagaaactagaaagaggattccaaagtgaatggcatttgtaaaggatgtgaggaaggtaaaattgtggtggatttgaggaaatgaaagaaggacattgtagctaggctagggagtgaagaaaagaatggcacagatgagactagaaagttagacaggagctacttcatgcagcagactgttttaaggactttggcataaagtaaaagtgtagttgcaataattacaaaaaattttcaaattttcaattgtttttttttattattattatacttcaagttttagggtacatgtgcacaatgtgcaggttagttacatatgtatacatgtgccatgttggtgtgctgcacccattagctcgtcatttaacactgggtatatctcctaatgctatccctcccccctccccccaccccacaacaggccccagtgtgtgatgttccccttcctgtgtccatgtgttctcattgttcaattcccacctatgagtgagaacatacggtgtttggttttttgtccttgcgatagtttgctgagaatgatggtttccagcttcatctatgtccctacaaagtacatgaactcatcattttttatggctgcatagtattccatggtgtatttgtgccacactttcttaatccagtctatcattgttggacatttgggttggttccaagtctttgctattgtgaatagtgccacaataaacatacgtgtgcatgtgtctttatagcagcatgatttataatcccttgggtatatacccagtaatgggatggctgggtcaaatggtatttctagttctagatccctgaggaatcgccacactgatttccacaatggttgaactagtttacagtcccaccaacagtgtaaaagtgttcctatttctccacatcctctccagcacctgttgtttcctgactttttaatgattgccatcctaactggtgtcagatggtatctcattgtggttttgatttgcatttctctcatggccagtgatgatgagcattttttcatgtgtcctttggctgcataaatgtcttcttttgagaagtgtctgttcatatcctttgcccactttttgatggggttgtttgtttttttcttgtaaatttgttggagttcattgtagattctggatattagccctttgtcagatgagtagattgcaaaaaatttctcccattctgtaggttgcctgttcactctgatggtagtttcttttgctgtgcagaagctctttagtttaattagatcccatttgtcaattatggcttttgttgccattgcttttggtgttttagacatgaagtccttgcccatgcctatgtcctgaatggtattgcctaggttttcttctagggtttttatggttttaggtctaacatttaagtctttaatccatcttgaattgatttttgtataaggtgtaaggaagggatccagtttcagcttctacatatggctagccagttttcccagcaccatttattaaatagggaatcctttccccatttcttgtttttgtcaggtttgccaaagatcagatagttgtagatatgcagcattatttctgagggctctgttccattctattggtctatgtctgttttggtaccagtaccatgctgttttggttactgtagccttgtagtctagtttgaagtcaggtagcgtgatgcctccagctttgttcttttggcttaggattgacttggcaatgcgggctctttttttggttccatatgaactttaaagtagttttttccaattctgtgaagaaagtcgttggtagcttgatggggatggcattgaatctataaattaccttgggcagtatggccattttcacaatattgattcttcctacccatgagcatgcaatgttcttccatttgtttgtatcctcttttatttcattgagcagtggtttgtagttctccttgaagaggtccttcacgtcccttgtaagttggattcctaggtattttattctctttgaagcaattgtgaatgggatttcactcatgatttggctctctgtttgtctgttattggtgtataagaatgcttgtgatttttgcaaagatactcctcgagaagagcaactccaagacacataattgtcagattcaccaaagttgaaatgaaggaaaaaatgttaagggcagccatagagaaaggtcgggttacccacaaagggaagcccatcagactaacagctgatctgtcggcagaaactctgcaagccagaacagagtgggggccaatattcaacattcttaaagaaaagaatttttaacccagaatttcatatccagccaaactaagcttcataagtgaaggagaaaaaaaatactttacagacaagcaaatgctgagagattttgtcaccaccacacctgccctaaaagagctcctgaaggaagcattcaacatggaaaggaacaaccagtaccagccactgcaaaaccatgccaaattgtaaagaccatcgaggctaggaagaaactgcatcaactaacgagcaaaataaccagctaacatcataatgacaggatcacattcacacatagcaatattaagcttaaatgtaaatgggctaaatgctccagttaaaagacacagactggcaaattggataaagattcagacccatcagtgtcctgtattcaggaaacccatctcacgtgcagagacacacataggctcaaaataaagggatggaggaagatctaccaagcaaatggaaaactaaaaaagtcaggggttgcaatcctagtctctgataaaacagactttaaaccaggccgggcgcggtggctcacgcctgtaatcccagcactttgggaggccgaggcgggtggatcatgaggtcaggagatcgagaccatcctggctaacaaggtgaaaccccgtctctactaaaaagacaaaaaattagccgggcgcggtggcgggcgcctgtagtcccagctactcgggaggctgaggcaggagaatggcgtgaacccgggaagcggagcttgcagtgagccgagattgcgccactgcagtccgcagtccagcctgggcgacagagcaagactccgtctcaaaaaataaaaaaaataaaaaataaaaaaaataaaccaacaaagatcaaaagagacaaagaaggccattacagaatggtaaatggatcaattcaacaagaagagctaactatcctacatatatatgcacccaatacaggagcacccagattaataaagcaagtccttagagacctacaaagagacttagactcccacacaataataatgggagactttaacaccccactgtcaacattagacagatcaacgagacagaaagttaacaaggatatccaggaattgaactcagctctgcaccaagcagacctaatagacatctacagaactctccactccaaatcaacagaatatacatcctcttcagcaccacaccacacctattccaaaattgaccacatagttggaagtaaagtactcctcagcaaatgtaaaagaatagaaattataacaaactgtctctcagaccacagtgcaatcaaactagaactcaggattaagaaactcactcaaaaccgctcaactacatggaaactgagcaacctgctcctgaatgactgctgggtacataacgaaatgaaggcagaaataaaaatgttctttgaaaccaatgagaacaaagacacaacataccagaatctctgggacacattcaaagcagtgtgtaaagggaaatttatagcactaaatgcccacaagagaaagcaggaaagatctaaaattgacaccctaacatcacaattaaaagaactagagaagcaagagcaaacacattcaaaagctagcagaaggcaagaaataactaagatcagagtagaaccggaagacatagagacacaaaaaacccttcaaaaaaatcaatgaatccaggagctggtgtcttgaaaagatcaacaaaattgatagatcactagcaagactaataaagaagaaaagagagaagaatcaaatagacgcaataaattttcaattgttacacagttgaatattagttacatttagtagctaaaggcttagattggagtgtcttttttcttcagagacagttttgttaaaatggtaccagttagaccaggtgcaggggctcatgcctgtacccagcagtttgggaggctgaggcgggtggatcacaaggtcaggagttcaagaccagcctgtccaagatggtgaaaccccatttctactaaaaatacaaaaaaaaatattagccggacatggtggtaggagcctgtaatcccagctactcgagaggctgaggcagagaattgattgaacccaggatttggagattgtagtgagccaagatcacgccattgcaccccagcctgggtgacagagcgagactctgtctcagaaaaaaaaaaaaaaaaaaggtagcaattataaatgtgttattggcttgcagtcattttttctatggagatatacatatgtgtattcatgtgtttgcatatataatgtattgagatcttactacaaacacatatcatattttacacatttaacattatatcatgaatgtttcttgtattacacacaaaaaactcataacaagtatttaatattcaataggtacttaatatactatagtatagatgtgccaacatgtatttatcaattccttattgttggatatttaggttttttattcttactatttgaaagaatatttattgttaacacatacttctacatttttccttaatatgtataacaacaaaggaattgctaaattaaaggttgagtatatttttgaagacacttgatatgcatggcaaaatgctttcaaaaaaattacatcatttcacatggcttctaatagtatacaaatgtgttcatctgtctgtagttatatgcatttgatagataaaaatggtaggttgctctaatttgcatttcttttattcctattgagaccaaacattttccatatgttcttttcctatttgtttgtctttctttttttgtctgctcacacactttgcccagaatattttagaggttttaaaatttgttttggtatttatggaagctaaaataatatagatagtaattcttagtcattacaattttaaatattttatctgatttatctttttggtctttttatgaggtttatgatgtagtacttcagatttttgataattaaatctttgctaatttatttttataaaaaatattttctccgtctacagttgaaacatatgttgctttattttgctaaatttatcagacttaaatttgtatacatgatgctgcctgtttctgagctatttatttcttctccttttacctgtttctaatctgattgaattgtggtgctttcaacatcttaattatttagaaaatacatttgtatcttatgggtaaagtcattattttctcccttcaggttattattcatttctgttaaaaggtcttagttcttttcatatgcatattcttccagttgaacattagattgagttgaaaaaatgacagcaatatttttaatggagtctccttcttatacattaattcttctgaaacttacatcttaaaatatttctcatctagaaatgtgttatttttccatttacttaagcagcttgtatctccattaaagttttgttattttccccataaggacctcacattttttgttagggttattccaggtatttttacttttgtgatggtgttcatttatttttattataatatttaaaaaatctctggtattacgtcagtgtttttaaaacatgccatttttattcaatactttaaaaatatttataaatctctgagttggcaatttctccagctctaggaagacagaaaatacacagatctgtacactcaaagaacgtgagtccagcccactcagtcatatgaacttagctggatataacacgttaacagacaggatagacatttttaccttgaacagaaagagctgtaattcaagttctgtgtcacagatacaatccgtacattatggtttctttaaataagccataaccaattttttttagtaattatttgcttccagttattcatgtgagattattaaaataagcttatgaagtaaatataagatgtttcaaatattcctatccattgagaaccccagaaattatccttattgaaatttttagaaaaaaattagataggtgcacaggaaaatccttataaaattatgtccctgacagagtttatatgtataataaaaatcaagagggtgggtgtttctaaatattcaactatatggattgaaggcattgtggtaaatccattacaaagattatactgtatatttgttgatgagaaaatatatattcttacagctataaaacaatgagcatcataaaattctatgattgcaatatatgacagtagatcatatatgtatagatgtatgtccatatatacgtgtgtgtgtgtgtgtgtgtgtatatatatatatatatatctgaacaaatatgaaggacacacaccaaaatataccaaaatattaataacaatgattatcttcacattttaggtaatttcagcttttctctttatggttgctgatatagccttaacatttataataaaaaaaaattcttttgtagttagacaaagaagaaatatgtgaagccaaaataggaaaacatgggggaaggaaggactttatatcatgtttcatctcatagcaaaactattggaagcatttcagaaacaaaagaccttaaaacttcaaactctaataagaaattgggaacaaaaatcttgagattgttatacaagagatgttaaagaccttaggcctcagtttctttcagaagcccagcaattgcaattattatttattatcactttacttttgcttgaatctctttagctaaaggtggtttacttccacttttccctaataatttatgtcttcatgataatagattttcttattatctttctgatttgtacctgtttcctatttaatgatttactctgtatggcatacatgccaaagttatcatgctagaaaaattattatgctataataattatgataccatcaaactgaattaaattatgtttcattgtaaatagtaaaatgtattaatttttttaaaagcttttttatgccagcggagataaataaagttacctttatgtactttcattaaacacaatgacagtacaagccaaactgataacaaatcaacgcactccttcttgtaacactcctaagttgttctgaaatcagctttcttaggactatgaattcaatgcaatgtattaaacagaatctgtgccttctgtgaataaaagtttcacctccatctcttgtgagtatatgtaggcagatctttgaacaatgaggttttcttccattgatttaaaatgaaaatgaacctggattttaaatgtgcattctaattgtccctttagcacatcagaacagcactgcctaatagaaatataatgtgagctacatatataattttgaattttctaaaatgcacattttaaaaaagtaaaatgaaacagttaaaactaatttagtagggcttggtgcggtggcttacacctgtgatcccagcattttgggaggctgagggtggcagaccacctgaagtcaggagtttgagaccagtctgggtgacatggcgaaaccctgtctctactaaaaatacaaaaattagccaggagtggtggtgcatgcctgtagtctctcagctactcaggaggctggggtgggagaatcacttgaacgtgagaggcggagtttgcagtgagccaagatcacaccactgcactccagtctgggcgacagagtgacttagtctcagttaaaaaaaaaaaaaaagtaatataccttatttaatacaatctatctaaaatatcattattttaacatgtaattaaaacctaaaagttaatgagataatacattattttttctaccaaatctatgtctgtattttacacttataggatatttcaatttagattttttatcagatatattcagtctgcatttagatgtcataagttttcagttgagaaagtagatccacataccaaattgtttcaaatgtatttaaaagttttccagtaactgaatcaatgatcaatttttaatttaaattcattaaaatcaaattagaaattcagctcctcagccatactacccacatttcaagtgctcaatagccatatgtggataggggctattgtattggacagcaaaggtttagaacacatgtataagatgttaacacagaggaaaagttaaaagttaaatcaatgccaaactattgggaatgttttgtctaccgggtttcaagaaataatgacatgactgatatttttcttattgaatcagctgctcggctggttggctcaactaatagagtcaaacagttgctgggttttataaacaaatcatctccttttttatttggtcctccaattttcttaaggcaaatatttgtgccaaattatgccaaagtctgtctctcctgaatatccctgttatcctcgaatattgttgagtgtcccatgaatataactgttaaatgctgttttgagttaaaaccaagaacacctatattgagaaaaaaattaaatgtagttaatgttgtaccaccatgttttgttctagcttctcaactgtctcatgtaaataagcacaataaacatctactgagtgattctgtaatagtttggatctataggtccatcatttgtgatgacacatagaagttggcccaggaaagctaaaagtatgtcatatgtcaaataatgccttccaccaagtttagagcagcatttcttccccagcattacaacttcatgtaatggcacttggcagtattggcatttctgatatgacttcttttggctagttcagaattcttaaaaaataaatagtttttcaccctgtgattgaaagggttaaatagtaccaattcattacactcacaaaaggatttattttgttctcataaatcagttttattccacatttttattattcccttgggtgagctactccaattgaaatcaatacaagtgcaagtgagacaatcaatctcgatatttgattatggattggagattcccaggtccgctttttagccagtttctttctgatcatctcccccaaagaactgaatatttttattgacatctatgagttctgaacatgtttagaaagaagataataatcttcatttgtatactgacaatggaagccccacaaatgaacaaggattaaaaaataaagacttaaaatatgtagctataacatcatcagcaaacttcaaatttctcaatatttttcttaagatgtagtcatgttttaaaataactttattctttcttttaaaaaaagacctgttaatacaactggtggctacaaaccacattcttagggtgctattaggtaaatgattatttttcatgacaaagatattatttattttcacatgcttgtttcagagctgaaccatatcaactggtctaggttaacaataagaaaacagttaaggtgaataaaatgcctttgaaggtatccagcctaggtcttttcatttctataattgtccaggctggaaagccaccatctgggggatttaaaagagaaaaacagctcaactttaaattagagagcaaaattgattaagttgttcctcaatgaggccaacatttatatatcaaactctctttgctttacaaacaaatttatatcttatgatcctttacatatcgaatgcttattttgggactcatggtaccatattattgttctcttgcctctgactctagccacctgttctaggttcttaagcaaaatttttgaaaaggcacaattaaacctttccgtaattcattatttgatacttagaataaggcaattatttgatgcacttatctaatcatattcttaaaataaatttcaaggtaatattaacactgcatttgttactttcagcaaacattttagccttatttagccatttactaattttcactagaatccattggaaggggatgtttcatgttttggacaaattacctaccactgattttttttcaggaagacatataactttgaatgttgtaaaaaagtattttagaaggagttaaaatagtaaacccatatttctttcatttaagcaacattaattactcttcagttactcttattaagcctttagaatagcagctgtataagccatataagccaggcacttggatttccactggcaaacttcctaggcatgtggaattaggggactgtctagaacttatttttgtccagcttcatttccttttcagtaatttgcatttattaatgctgaataatgaaagataatcaaaacattaatgaaggtatggtgcagtgatgtaacaaagggctatatcaacaaaatattctttccacgtgctttgttccactctttaaaaaaaatatttactcaagagaatcattctagaaactggaaattgctccctttattcaggaaggcagtatattttttaaaagttagcttctttaattgtttaattcagaggttggcaaatcttttctataaagggatagaaagtaaacactttagactttgcaggcaatatagtctctgccataattactcaattctgcagttatatcatgaaaattcctagaaagataattacttttgttctaataagcctttatttacaaaaataggcagctggccaaatttggcttgtagattgtagtttgtgggaccctgttttattataactcgtttatacattaaaatgcaatttacatactttccttggatatttcaatcttctcatgattcatttgattttgcaaaaattatgaatgctaatttaaaaatctatgtaatacagaaaaacaacatccactaaaatcccactacccataaataaccaatgttaacaaacagtaaacattattttagagctgtctcaattcatgggtgattcttggtagcaaacaacagaaacaaatttggttaattcaggcagagatgaattatattaaaggaattcaacagttcaaaaagttgtcaggaaagctggagagtcagacttgtggagaaccacaaataacatagcccagaccagcttatgccttcttaggacacccccactggcaccatcaccattcagtcgccttggaaaattatcactctacttctggattctcaacaattttagaggcatcttgaataatccttagttgactgtgagccattgtttcactggatcaagctttgtagtccccagatgaaagcaatgcaactgactggcagtcccatggtcttaccacatgaacttcaggtgtcctttcatttacaaaaaaagagaaaattaagttatgtttctaatcatttctttctacatacctattatcttctccctgattgttagagtttcttgatctttttacttatgcattaattatgattctctcaaggcttttcatcataccattgatttagattttagctctattctgttcctggctttttctaacttgtttattaaatacttactgcattttttaatttccagattgtttctctgtctctgcaatatcattttatcatattatagggaatatatatcattttttcccaaactacatggttattttgtctttttatgttacaatcctttctttagctgtatgtataatactcgatatattatttttttcttcaacttcatcttgcttatgccttgtatgggcagctctgtccagattttgcactggttctgagcttggtctacttcctttcctttctggtgctagtcagtcttctttcgacctaaattttgagcactaggtgttgctagagggtgcgaagatgcactgggcagaattctggggaatccagattttctgtctcctctgagatcctattatatagcttttgtggcagcacttgctgcatttattcacatgtatctcccacacctgggaacaccagctttttcccccaactcagcacagtgcttggcaggatggccagccctgatttctcttcctgtctctgcagactctactcagttcatttctctacatattggagaggattttttttggcttatactccttcctctgggaacaaagttaggagctgcgctatactaagaaggaatttaccatctctttcttcttttaggtttcaaaattcatgtcggtcatttttttccttttcctttatacatttgtacctggagaatcttcaactaaaattgttaatgttactgttttcatagtttgtttccattctgtcaggtattttggaaagacagttgtgtggtaccacttaatttagaagctgtgaaagttcacaatttgtccaaaatctctttctagcaaggtgattcatatatacagttcagagactaacagggagactgtaaggtggcatctgactttccccacctcctggtgttcatgtccttgtttactctccttcccttgggtgtcttcaaaacctgtgacttgctgctcaccagtagaacagaacaaaggtgatagcatgccacctccataagattgtaacctgtcttgctagaagactccctctttttgatacagcaagtggtcacactggggaggcccatatgggaagaaatgagggtgaacgccaggcaacacaaaactggtaactgagagcagccttgagtcaatagccagaaaaaattgagaccctcagtctcgacagcctacaacaaattgaaaactatcaacaaccacctgagcttgcgagagatccttcctcattggaaccttcagatgggatttcagtcctggccaacaccttgactgcagtcttttgagaccctgagcacaggacccagttagctgtgccagactcctgactcacagaaactatgagattctaaatgtatgttgctaagttcgtggtgataccatgacacatcgataggtaactaacacaggaacaccttactgtgtgactgtagcaaatgaaacaggtagaattcaacagcaaaacatgatatcattctcatccagacccccaagtcgttgctcttcttttacagaggaaccatctcaagtatatatcttccagtaattagaagaaaatgttaaacatgtcattaaacaaagaatggaccataggctttgtctgggatcaataatggttgtcaaattacttgtctgatcctagtagcaccacaggctcagcaggttcagcatggttagtaaggctctaccagaactttaaaaggaaacacgttttggtgataaaatagttgtattcatgtccagtgtttagtgtggaagccggagaccactttctatgagagtatatttgttcaataacttttagctgattgagataacagcatcagtttgttcagctggaaaaaagtttgcccaaatggcaaaaaaaataagtcaaagtggaaaaaaaccctgacatttcagagcatatatggttagtaaaaatagaccatacttctacaatttacaatagtcacagtacatctctgaatttactctctctctctttctgtgtgtttatatacatatatatagtgaactgtactgaattttatatatcgtagtgaactttatatataaaatgtataatatacatgcatatatacatatatctttcatttttataactatttttagagcagttttaggattacagcaatattaagcataaggtacagagatttttgtctatcctttatgcattatagttcctttctgatattcataaaatgagatacatttaggaaaatctgactgtggtacatagagagagcttgatggggaaaaataaaacatgcttcaacaaactttaaaaaataatttgcgatatttagaacagtaattgtgcctacacgttaaaaaagatctagagaacaaaacataaagattctcgatatctatagagttgtcattgctcttgtatgggcacaaccaggacaaatgtgtctgaagcatcttttggtgagttgataaaatagtgcatgtatttattccctgcactacaattgtcaggctagaggaatgaccaatttaaagaggagtcaaagaagtacagctttgactagatgacaactaattaaaatcactattacagtaattacagtaatgtaagaaatatgatgcattaatcgagcaccgtcctcagaaggtcttagtggttcataggctatttatttctctttcaaaatatcctgtggagaagacagcttcgtaggcatatgtccataaatattttatacattgtcaaaaacttaaggccaggaatagatttctttcaccatatattaattacaaaataaacaaatactcagcacctttcagattcctaccaacatgagatctatcagaaaaatggaatctggaagaaacacttgctttttggttaaaataatttaaaataatatttttagaaggaataaataaatgtaacttaaatattaatacagggtatatagagagacctgaaattcttggctcacagtaaaggctgattttgccagtttaccttgatcacaattcagtgtcttctgattttggtattggcagaatttcgtgatagtgagatggaactgaacaactctaaaattgagaccttaataccagaaaaatatagtatttctttgtacagcaagaagtgggaaaaattagttaataccttttctaccttaaggtgtaattggattcagaaaaagactaacttaaagcaggaccaggcctgacatataaaatcctcacgaggtaacaagaatcagtttggtttgttcactgtcatttctcattataatctttgtcatgagaatggattcatgttgtgccattttctgttcctgttacaatctttgtcacatgaataagatatcaggatgttaatgcctggcatacagtattgtgtgtgttatgatactgtacaggactacgctgacctttgcaatattatgtattctgattggttgttcatgtcacctctttcccacaagttaataaggctgtaaaaaggagagaactgaaatggccagccagtcaaattatagaatattgaaaaggtcagagcagtccagcacagagaaaaaaaaattatggaatatatggtgcattaaaattcttgtgacaatgattgtaacaagaataggaaaggatacccatttatgttattccaatctagagaaccccataggatggtattctcgagacagcaatcatttacgcatccctgagtcatacatgtgaaaatatccatttatgctgttttttccttaaaaataattgcatagattttctactattcaacaaaaaagagcattgaaaataagattttcatctcagaaaaggggcattaatattgttaacatttcagttaagactttatatttgagactaaagaaaaggtttttttataagtaaaacctgttgttcatatgagatttatttggtctattttttcatgtaacacttttctttgaaataaaataggagagtaggactgaatgaattaacctttttcaagaccctttagaatgtgggatagaccgaaagagcagttaggagtttatgtagaaattctacatgatctatgcaaaacttattttatctttatgatgtgtgatgttggccaatacacaaaaaatcttttcttcctctgcatcttcagtggaaagatagtgacagagagaaagaggtataatacttaaatcagaaaccctgatgttattgttcttaagtgtgcaataattacttatttttcaaattgtttttatgcatattttaaattttcttgtagaacaacttcattggattttgtagcctataaggagacatctgttttaaaccttagctttacacttatttcactaatagagtaaacatgttatagtccaaagctagtcaaagctagtgatcccagcaccctatgctctgatgctcatccagtaggcctggcgtagaattcagatatatgaatgtttatgaggtaaccccaagtgattttgatgtaggttgtgcctggaatattggtattggcaacctcattttgcaaagagctaagtgagacccccagttaaagcccaatggctcagaccaagccacagagggtggaggagggcaactcaacttcaaatcacagtgcttgggtgggggcgaagcaggcagtggggagttgcggttccagaactcagaagcttaaaaggtcttgcaccatccacttatactcacaaatagggtcagattggagggccaaccagacaggaatggtcgcctgcgataggacacacttatcactttcacattttcaagcttgatttttgaggctgaaccaacgaggctgcattttccagcccactgaaagcccagtttatgcagtgaaaagtggcaaagcacaaccatctcaacaagaggaacctgagcacaagcattttaaaaatctacccctccccgcccatattgaggagcccaaattcctaaagttcaaaggaagaaaggaaagacagtgagagtgaaatggaggaagagctaaaatctgtggatcctgctttggttttgaatctggaaatttttgagcttcattgagggctgaaatcctgtcagttactctaggtctgtgaattgaactgtatgtttgtaggggtgagagaacattagactcactcagctgtatagttactggagatgtacaagttcttttttgagctgagcaaaatggttatgtaattgcatacttctcataattattgagtaattatatacttcttataattactgagtaatcattgttctataactagaacttaatgttacaactaattatataattaccatgtattaatgttgttatctaggaagcttagaatgaagtgctacttatatatctccccctgccatgccattttcaaagcaagcagtagtgtttgttttttgtttgttttacagttcaaaatttccttaaaaaacaaacaaacaagcaaaatgcaatggaaaaaacttcaccaatattatactcatacatatttactcattgattttgtatttgtccctggctgaaaatttgtaaaattatattctcatggcttaattttagaatttccattgttgctttacaaatttcaatcttttataagacctgcacagttacgctacttgagagtcaattgaatatctgcttgagtctataggacaagctgacctttttgaaagtttacaattgagcatgtaatgacagcagaaatacttccaaggagctcaatatcatggggacaggaggagatctccccatgctgaccatgtaattgttcttaggcaatggttaggatggtcatatttaatcttaaccaggtttcttgagtgcaagaattatgtcttatgtacttggggcatgttctcgtcagtgcctagaaaagccttctccttgcatgcagttggagctcaataatcttcagtagaagcaagctgactagttgtaaagaacctaggaaagctaaaatggcataaattggaaatgtctttttagtgcataatgaaattatcaaaggctgctttgtaggtttcataatgtcttgctaataagtattacacatatagaggagtgcattatctacttacattttaggaccttgaaatcattctttaagctatgaatatgtctttatctgcctttactgaaagtgaatagaaattatcattgtcacgttttagcccacaagcactgtttatttcctttgaagtaaactacttatttggatgtgccaattttgggtccagagtaataaattatattatgccattagggctttcttctgctcatgaaaaaaactcctgagtattttgtaacagtagatttttcagtgacttcctccatccctaaatggttataagtatctttttaaataactttttgtatgtttttacaatttgttggacctacccatatttcatgaaaatagtcaagtaataaccagatatcagaccctcttttgcattatttgatcttcattaatttcagtttgaaatataatctgatgggacaatgacacattggtaatggatgagattagtgctgctttattcattgaaaaaccttagaattttgatgaataatacattgttaggttggaaggggtagagaataggtaggtaattgctactgagaaaatgaaatacagagtacaaaattcttaatcacttgctagttctgaatggctagaatgtatcagttgtatggattacaacaaaaacaataacatcattcctagctgttgtttatgagcaactattatgtgctggatatgataaagaaataatctcacttaattttcacaatagcactgcaatgtaaatactgtattatcattcccagttcacagatgaagaaccagacattcagaaatattaagtaaattagcaaagagcacattgctaaagaatacaagaacaagttcaaatgcaggacttttgacaaccaaatttatgttctttcctttgcactatactttgctactaaactgtgttaaaatataatgtttttgtaaatattgtaaaccttgcattttgtatactatacgatgcaagatcacttttagtatgatgccatcttttactttttaagcatttgttcaataaagattatatcagtatctggagatcttgccagtatgcttgttcttctctttgaagctcaatatcatgtgttttttaattcatttgtctatatctgcagaatttgtgtgtgaaagattgaatgtacatataataaaaagtggttttatataggaaaaaggttatttgaagtaaatattggtgctcttttagataaaaaaatctcactctgtgacccaagctggagtgcagtgacacaattatagttcactgtaatctcaaatttgtgggttcaagtgattctcccacctcagcctcctgagtagctagaactacaggctcataccaccatgaccagataatttttaattttaattttttgtttttagagatgaggacttgctatgttgcctagcctgggtggtactcttaatcattcatttttctgttttttaagagttattgtatcatttctaaaagtgacaaacattaagcagcatttaaaaaattgtctcataaatttttcaggaaagcatctaatatagaaaatgttacaattttcatctgtagcccttttcttattttaaccctaattttttactcttaacctgaaatttaacctaatggtgtaagagagagagataaaacactgttactaggcagaagtattttcctgcattttggactgatgagatttaagaatgggtttgctaaagctttggaaggacagtggtgttgggaccagggtgaggatgtattaaaagtgattcttttatatagctaggcagcttctgcattttctcataaagctaaaaatattagatcttctgatcaaagtggacatatagtacctcccatccccagttgcttttcaagatattctgactaattgaaatttaaaagggcattagatagaaagaaatccacccacatttcaagcaaagtgaacagaaaacacctcagtttgtgaaatatacaatatctgacaaatatgtctgagtataatacgtatatccagaacaattctatttgaggaataatgtgttatttcttcctgtctgcacatccaaaaaaattcagggatttttattggaaaaaaaaccctcaaaaaagtataaacaactcatcaagtaatcaatttctacatttgtgcaatacttttacttatatgcttgatacttgtgatatggctttatcctacagttatctaagaatattcatcaaattatttcgattgccgtgatgaatgaattggccaggtcaactcagatagcacttttgttcacaagataataaaatccaaatatgtgcattgatagaagcacatgtaatgcctcttagagtggtaaagttacagacctatttggtacagtatatttagaaactcaagaaaatactcaaataatagcaggaatgaattcttaaatatgtatttattttaataattttcttttttaatcagtaggtaataactacacccttctgaatgtcacaaaagtcatgtacagcggagaagagacaaacctttgggtgctcatcgatgggctggttccttttaccaactatactgtacaagtgaatatttcaaatagccaaggcagcttgataactgatcctataacaattgcaatgcctccaggaggtaagtctatgcaaatgttggctatctaattttatataaatgccctagaattaagtttccattgaataccttgtttatttttagaggtattttattttagaacttagaggctcaattgtatttctggttcttttaatagttgttgttttgctttgtttattcagattctttaattgacgatcttttattgttttgttgagactgctttcatccacctcacactgtgtgtatgtgtgtgtatataccatacacacatacacacacacacatatatatatctggatttctgcatgttaagaaaattgggaaatgattttgttcaaggcgttacttaaagccaaaatttatatttgcaatttgagcttccattttctactgcaaatggttctcattcctggtgttctaaataactagttcaattgtatacttaaagtacttcatttggcaaaaagggcagggtgcagatgatagaataggaaaattccatttgcactactggaaaacacctttaaattcctgatcctaataattacagttcagcagggccacattcatgtgtgaaatgtgatacagtctgcatatttttattttaaatatttctataaaaatcgacctattcacaattaccattattttgatgtgccttcagcttcaccatgttttaactcgttgcgggaaataatcgcattgaggaaaacccctctagggttgacatggatggcccttgaacagaaagcatgcctcaaaatgttaagagcatgactctcaattgagtgctaaagaatgtgtgttttctgaaaatcctgaaggcaaaggaccccaggacatccagcatctgccctgtagcccatctcccaggaatgagtatattctgaactaagggagaatgtcacaatcttttatcagcaatccgaagggcaggttaaccccacttccagttatgaagagtataagaacacaaagtgctttatcactggagaaaaataaaagggaatcttcagtttgtatggaaccgctcccctgcaaaaaagattcattacttgttgtatcataaaaccacacactattatctaccttttatgccattattaaaattaatgaattgatgtttactaaaatacttgaaactgtaaatgtcagaagctacattacttaagaaaagaatgcataaaagaaacttttgaggctgatcaactcaggttagtatcatatttattgagacaataattttaaaagggaattgaatttagatatatttatttaaaaattgagactgaaacccaaaataaaacaaactccccccgctaaaataaaccttaggtattcatatcttcatttttcacttcaatacacatgctaggaaggatagaaaactgtgatggctctaaaccttagaatataatatcctttactcaaatttagaaattaaagagtaatcagtgccataatggaggttttaagttatatagtaataccttttctacaggatatatacaatatttaataagcgtgtttattttagggtatttatactgattaaatagtttgtgatttacagtaatttatatcatattcataaaatagggcaaatttaattcattgtttatgtttttaggaatgtatggtctaataatttgttatttatacatatatcaagattcaattaaaaatagcaaggtcctactgctaacggaatatgcgctatgtgaatatacctgtcagtaaaagggttaatattatacaaatagaaagaaactaaaatattgttttatagtggtgcagtcaaactgagtaaaccattaactgaggcttatcttcatctttgctctgtggatgcttatctgtgtcattaccataatgcactgcaggcccacactctctgggcctgatgcaatcctccactttatgtattcagaaatctagaatttgggagtcagtccttcaccaaagaggaagcaaatgtcttcaaagacagacagtgattcgctaaagtttattatggccattaggacatactttcttttttcattagattgttgttgattacaattaggaaacgtatagctttaaaattatcttttttatgaccttgtggcagtttaaaggtgatacctcattgattaaataggttttagttcatgcttccttttacttaatgatctgaaaacatattatcctgatttacacataaaaatcatgctgaaaagcatgtggcattcactagaatatgtgtgtttaagtagaattaaattagtactgagagttattaaagaaatcttccatgcctttgtccagtgaactgtgtttcattctgaaatgaataataaatggaccaatatacggaggcaaaccaacttatgggcagagaaggttctatatgctatttacttttccattatagttggattgttatcattattgccatttccttgatttcaatattagatctctcttatggtgatgttgaattcctagtatctttcaatgctgggtgatgcaagatttgtgatgataatatccttagctatgcttcttttgcatacttttaaaacataataagaaaagagttgggcaaaataaaatgctcttttttacttcatcaaatatttgctatcaaatatgacctggaaaatcccctttacccgtttaatctggccaaatcctactcattttttagcctcaaacctagaaattggtctatcagaaagtcatgttttgccaacagaggctgagatagggcctttctgtatcccagagaacagttacattatactgaaattgcctgtttaatctgtcacaatcactggttataagatcctatagagtaggaactgtttcttactcacatttctatcttcagcacctagactaaacctgacacatggtaggtgcataatgaataattggtgaatgaataaattagtcaagattgcttaacgacttgttttaaattttaagcttattattactcaggccctccaggcctcatctcaacctcagcaaccttgtattttagccagctgtgaaagagaccttctctgtacaccactgtccaatgtaggaatgctctggttatgtagataaaattgggagctcaaactgtaaggagggtgagtgtattggaggtgagaaatattctcaagttatgccaactcttcattcttttattcttccctatagtggttacttttctcaggtgagcatagaataaacaatccttagtttagatagtaatttggaaaggagaggtgaaagggtcatactccaaagaattttaccaggatacatcatctcttaatttgtagtcaggacacatcttatttgccagtcctacctctatttttctgatgagaaaaaatatataattaagaatatgataaacacaagttatttgaagatagaaattaaagtaagaagatggtgctactaataacttggcacatagatgaacagtggcaaatcccaattaacacacattttttatttgaaaaattcactttaaatattatttggacaactggaggggcgtctctgttttttccaattatgtagcagatccttccctacttctgcacactcaagttttttgtatttctacaattactatatttttaggttgtttgtaataacataatgctcatatttagcactaaggtattcttggaaataaaggatatatttaatcagagctcttgaatagtattatggtacaggttcaagagttctaggaaaagaattaaaaaaataaaaacgaatccaaatgttaatccataaatatgaaactttcctatggcctttaccccttcaaggtctggagttactaatggggttaggatttcaacgcttaatggggctcagtgcattagtgttttgtatgcatggaattcagcattcagtttaataagtggttgacattggtgatgtcccttaatttgcttaaatctaattggctcttttatcagtcaaacctgtatggattggcaattgatcagaaagggtcagccatgactctgcatgtagttaaatgatggaagcaccagttaaagtcacagttgcatgataataagcaaaagaagaacaaatgagcttagaggaggaaggcaaagaagcttagaagttttgcaggatcttcaagttcagaacaaaggcattatagagtatataaattttaaatacactgcattttgcctccagacttaaacctttttttttccagatgaactgaaatcttgtctgaaactgtctttgttacatcaaagaactactcagaaagctaaaagagacagaagaagcataaaagggcatagtttaaaatgattagtgacaaattccatactgacgagctagaaacagatttttaatgaaagttttatattattccaaaaggaataattctgtttatctttttctgaactgctttattgtaacagtgaaaggaacttggagccaccctggtttgtgaacctaatccaattttcctctgagagtaaataatttgtcatttgtacttttaagttgatgagaattattataatctacaaacagtgtaaaatactaggcttgagaaaatctgtttatttgcccaaatgtgttattagagaaccaaaaattgaaaaaggcaaaatggttgcgagtagtttgttttacagggtcttttcgactctctctccttcccctgaaccccctctccacttatccacctaaaatatcaatgagaaaaaaaagaaagaaagaaaaccattaggaagtaaaacttaggcacatcgcaaaagcatagacgttggagtcctagaaacaaggatttaaatccacctctttcactcactgcttgagtgactatgagcaaatctgcagatataactgagcttcagtttgctcatccattaaagaggctggatggtaattcccacctgactggaggattgaacaacatattatatgtaatgtgtttagcgcattgcctgtcttggtaaacatttggtgcttcctacctcttttgttctattttcctactaagactctttttggggacctggaaaatgccctatagaaaaagtaagtaaaaaaacctgtctttcacatagactgcagagaccagaataatttcatcttgctacatccctatcctttcctacacttaccccttaacatgttgacatacatatggccaggccagtaaccctgctaaggggtggttgtgatgcatattagatgatgaagtaagcaggaagcatgggaagtgattttctttttgaaataccttcagcatcctcctccatgacctccagatcataatttgcgaagatttttacatcaagctctcattggtcatcttgggatttcacatattttcttaatagaactcttcttctgtgtttatatagagctacttattaaatataattatgactttttaaaaaatgtctattattgtatattttattcacaaatgcttttttttacattgttaatgctagcccaaagcaagtaatttgaaattttatcctaagatgttttcatgttttcttaattgtcctcaaatacatatatttaaaagttacatcttggaattcaaactttttttcatttttcactaaataggaaagtttactagttgttcagccaatatgcttttgaataactaaataaaatgtttgcttttaaaagatgttagtatatgatttttgcccaataataccactaaaggaataatatattaatgactaacttttttagcttgaactactgaattccattctgtttagaatttaagagactggaatattctttcgggtattgctgtgtaacgagtcactccaaaagtcagcaacttaaaacaaccattctgtattatttctcacctgattgtgtgagttgtcagcatggttctcctggcttaaggaggctggactgggcttcttcagaattcccagaaagaaactcagggtttcaagagtcaagccctagtgtacaagccctgaaaacctttgcttgcctcaaactgtccaaagcaaatttcttgcccaagtcaaaaagcatgtatgctggaatgtatgatttactggagcctgataatttgtcaatcttccataaatgtctaagtgattggtttttagattgtgtatgtgtatatgtacaaacacatacatgcaagtattacagatacataatttttcttttaaattagttctgcttttgaaataatgatgtactagcaccaaaaaaaatgaagaaagcagtttactaaatttttccttgaagaagatataaaaaaaaatctttccttacatgacaattaattttgatgttttatttcagtataaagatcaataaatgtatatcaatagattcttgtttaaaatgtttgtagctccctattggagggaaaattctgatctcttcttataagtaggtgatttaaaaaaaaatcttagctatttctcaaatctaggccttgggtattctgatttctgcttgtaactttgaactgtgagagtagaaactgtgtgtaatttgaatattttctgtagctccagtgtctggcataaactatttgctgaataaattaccagagccctttgtggcagtgataacttggaaaataatcctgaaagttatattttgctattgctgtgtcttttacttggataaacattttccagaattaaattcaacatttagggtttaattcatcctaaaattatttttagtcctgttaagattaccataacagtgtaaaaatacataatataggaccctctggaggtatgtttataaatttgtgtgtgtgtttaattgtctattttacctaccattttattttttatttttaaataattccatcttttatattatgtttaggggtacatgtgcaggcttgtcacatggatatattgtatgatgctaaggtttcaggtatgattgatcctattgcccaggtagtgagcagagcacctaatagttttcagttctttgctttctcccactgttccccttctagtagtttccactgtaaccaccattttcaattaacttatctattgtgattggtggttgaacacttaactgaaaataatgattaaaacagaacatccaaaaatttaaatatatattaaacacaactttaatttagaacacataaatatatttatctatatatttatccaacaatcttgttatatagggccaagttgttttcttggagtgttaatttagtatttataagtccagcatatttgctgccaaaactatattcataatgcatagtttgatttccactttgaaaactcctttaaaaggagaacaaaaatttagagataattaaggaagaatctaattatagaatttttcaggcttttgtaatatcctaagtcttttagttatttttcctgaacgaatttcacagtattgttttattaagtcctcactgaaagtttttcaaagcagtaaattttcatagaaaacggtttctgttaacagtgctcatcagtttaagcattatttaattaaatgacataatcataatgacaaccacaattgacatcacaggtttaaaaaatacagctgactctttgtgagtgtataattctacctgcgactgcagaatgttgcccttgaactacagagtagtcaactatccatctctgcaatacagagtaaatgtaaattttttattaatctggcaagtcagataagaataggtaggtaaggctgggcgcggtggctcacgcctgtaatcccagcacttcggaaggccaaggagggtggatcacctgaggttgggagttcgagaccagcctgaccaacatagagaaaccccatcgctaccaaaaatacaaaaacttagccgggcatgttgtaattccagctattcgggaggctggggtaggagaatcgcttgaacccgaaaggcggaggttacagagagccaagattgtaccattgcactccagcctgggcaacaagagcaaaactctgtctcaaaaaaaaaaaaaaaaaaaagataggtaggtaaagcaagtgtctactatttaggaaaaagacacgcttccaaagtggcagaatgatccaccctcagagcagcctacccaagtaggagaggcaggacaatgctaccaaattcttctcttaggttaagcattaccacagctctgccttaaaagaaaaaagaaattattgattatatcccttcaattgattagggactgagtctgagatttgtggcataacttgctcagtgaacttatttttctccttcagtttttaaaggaaagaactgagctttctcttctattttcaaatttcaaccaaaatctctttctaagaccttagagcaatgaaatgtgtgggtagcactatcaaccagccaggtggagaatggtatttttttttttttttttttttttgcagggtctctaagagaattaggggcaactagaactggctcaaaaagcaagaatatacgaaagagcaaaagagtaaataaataagaattgcaaaaacaaactctattgtatcttgcactttcttcatgcattgtagcactgagaattgtaaaatatttctataccttttgtttgtttttgttcttgtttttttgagacggagtctcgctctgtcacccaggctggagtgcagtggcgcaatctcagctcactctatgccttttaaaatcaacttagtacaatgtcaagatgctactttttaaaaataaaactaatggttctcaaaaatgtgaaagcttgcttgccgagtacagatataaagctcctcaatatgtgttttccatttttcatctgctctgtatccacttagatttatttgaaatatataaatagaaacattaatgtgcaggtggcaatgggatatcttaaaaattgaaagagtacaaagggatggagattttaaaaataaacgtaggttagcagctgaaataagcaataggctaagatggtatattcccttattcagagggtagaaggaaagatgagattaactgctttttataatgtaaaagccacaatgaagatacaggatggtgaggaatagcattctttaaaacgacaacattctaccacataaacagatggtttgtctttaccttcagtatattaaaagctacacaatttatattacatccagttcatatgaatctttcgaatagttgtgcataatgttttacttctgtgtatatcttccaaatgtgctgctattttttccctggaaaaatcaacccattgaaagtaataaagtaggagaattcaacaaataaaaagtatttaaattcttaataaaataaatagtgtgctttcaaaaacacataccaggccatttaatttaacccatgctttctcccaggtacgagaatagaaccaaaggatttatgactgtcttaaacatgctctcaaatcctttcctgaaaagtgttacctttacttttttggaattgatagtttaacctgctttgtgtgtgtgtgtgcatgtatgaagaggtatatgtttgtaatattacatatcataagccaaagagagggataaattcctgtttcataatttgtgaacaattttttcactttttgtattcaccatcttgacaatgaacttcctgcttataaaaacaccttagaaaaagactaacttctgagctatggagaagagggaaggaaactttgaagtgtgcttactatggactcaacaagcctccagcaaagggctgccagctctccatatttgcatactctcatgtggattatatagaaatacacacgcccacacacacaattaagtgctatctttaaagcatcctggggcaagagagagagacttaaaaaaataaaataaaatcacatctttttcttttttaccaggggagaggggtgggaaatattgttcctttaagttccattgatattttctaactcacatttttaaaaagaataagtacaattcattttctttttttttcttcgaagacggctttatccataactttaagcttaaaaaaaaaaatcatgtctgtctgactgacactgcagtctaaaagcaacttgaagttttatttgaatttttatagtgccctaaagaaatttttgctttatttctttaaaataatatcttgttcctcattttttcatagacaaactgtatgcctgacttgcataaaattctatgaacatttacctgcctatataaatactcacaaaagtgagaaaattcttaatatgtcttagatacttagagaccatatttccaacctcttttcatcagcagcatcaagaaaatccctttttctatctctataaaggcatatagaccccccagagtctaaaagaaaacttaaaaacttaaggaagaatagattttgacaacagtagggaaattcacttacaaccactatgcttttcatgattgttaattaattgggacaaatgaaactagaaacatgagggtatctaatatatactttattagattaatccctcttacactttgatgaccattttcaaatgtatactatctttcatttttatttaaatgtttcgtatgcttgtatcatgtcttatctactagatggggaagataaaacgaatgggctgggtgtggtgtctcacacttgtaatcccagcactttgggaggctgaagtgggaggattgttgagctcaggagtttgagaccagtctgggcaacatagtgagaccccatctctatttaaattttaaaaagaagaagtaaaatgaaaaaaaaaatgagtgggtgaatggaggtagacagaggagtcacagctggtctccctttttctttctctatccctctcaccatttaccttggctcaggcatataataggatattagtaatgattactatcatgctcttgtgcagtcctagtggcctggggctatttttgcacccagcataccttcaccctttcttttgatgacagggctccaatttccctctcagcaccctgggctctttcaagatcagaacatgcacatgcgctgtgtgtgaagttgactgcatcaccaggtctgaccaatgaggacactgtattctcctaaccacagtgattttttttcaggaatgacaggcattccaatcaaagccactgaattgcagtaaaccagtacagtaaacagaggcatgtctcttgccctgtatttgaatatgggattcggctcaatttgctgccagccatgttgcccctcaaagagtctgagaaatttagtcagcaaggaagaaagcagagtgggtatgagagaaggaggtagactagattctggtgacgtcatttgatcctttgaatccagcattgccaaaacccagctctttcccttgagtgtttttttgtttgtttgtttgtttgttgattacaggaacccactacccatctcattgcttaagcctctatgtgttgtgttttctgccacttgaaaacaaaagcatttgccacaatgcttgagagaaaggaaaacaagtagagagcatttagagaagtctcatcacttcctgaaaatcatgccaaatgctaaacttaacatatgtgtttggcttttgcttgggctctcaaattaggaaacctcaagaagtaagctggatgtcacatgagataatattttctaaaactgtgaaatggctcatcccattctgaagggtctcctcagagccacttcatttgacaatcttctgagctgtttctccactattttcaggtctcagagccctgagttctagtaataactcttgtgctaattagctgtttggtctgacttaagtaactttacctgactatgatgttggtctcttatctctaaaatggcagatgtgaattagatcagcagtatctatagtgtgatcccagaccaggaacttcaacattccttgaaatttgcttgaaatgcaacttctcaaaccctactctcaacctacttaaccagaaattctgagggtggggccaagcaatctgtgttttaatgagattccattaccaactcccaggtcactgggtgccttcacaagtttgaagaccactgagctagaccatctttaaaatactttcaaagaaaaaatatatgatcttgtctatgactttattccatattcatatttgagacaaatactcagggaaaaataggtataataggcctccatgctcaactggtctttgaatatataagtcacattcgtagggccagaggtctttccaatgtaagaaagccatcgtgttgctcacagtcttcctgaatgggccaggaacagataccaaagataaccaattccagatgttgagttctacctgtggcaccagaaagcaacaggcatgatgttttatgcactggggaacactaatcagccctactgtgaagacactgtcagctaaatttcctttgctcttcaacttcttcacagaacatctgctataagaaactccttgtaactaaaacctgagtctttcccctctggggaattttctttaatgagcctcttgtggctacatctgtacagttttgaaatatgtttcctcaagtcagttacatcttcatcctggattctagggtttgctgtctattggacctcatagctaagatttttccttctaggagttcacaaacacaactccagagtaggttgacatagtgcccagtatctagagaaaaattaagatcatgtaaccttttatttgctaaaaagagatttttgatgttgtgatcactcataccaagatagcatttattaatactaggtgcaggtgtggttttgcatatattaactcattttattctcctcacaaaccctgtaaggcaagtgctattattatccctatttacacataaggaagttgaagaaacaatattggcttgcaactagtaaaggtcatcttactagtaaaaggcagacactgtatttaaacctagagactgactatagaagcctagttctgagccactatactctattgttctactgactgtagaactatactctatttcttctactgactgttcatatgctctcttggcagcagcaacacagattttgatgccccactaatcaatgcagatctgaagaggtgacttgactctatagtagggtcaaatataattttaagggtattgttggttgaactagtaggtttttaaatcctgttgcagatggcctagagaactgtcctcagtgactgtataacccatgctctaaagtttataatgtcataagagaaaaaaaatgtaggtaaaacatgtttacagccttacaaaaaagcattaagcagaagcaatattatgtggtacgtaccctgtgtggagaaggcaaagaaaccaaccagttggactcatcctttgccagtgtggatataagtacttaacttgcccaccaagtattttgcccaacttctgtcatatttacctatgaacttctattataaattattataaattgtgatcttctgattgtacatagtttgcattcttgtgaagagacttaatttatctaatagtgttaattttgaaaaattaacaaactttcttaaaagagagcaagaaaacttatatttgtaaaaactaatgaaagaaagaatctttttcttcctgtactaaaacaattttctgtgaacagttgaaaaaacactctagtcaggtgaagacacttattcatatgtggaatattctagaaataagccatgtgaacagtatgagtatgtgggaaaattgttcactggaatggccacaaaatgaccatgcgtgacctctgggccataagaaagcaggaatactttcctcatcaaaatctgaagttgagggcatgatcacaggaaaaagcttaaatcttattcccatggttgatgctataaatcaagtaagcgtgtatcttagactgtgcatttgtaaagcacagtgtctatcaaaatatcacaattcaacttatccaccacttgctatccccagcattttcatttcctgattgtgtgaccttgagaaacttttctcctctctaagcctcattttgctcatctgggaaggggtttcataattacagaactttcctcaatgggtttagacaaggaataaagaatgtgtgtgcactgagattagctggcacattaggtagctgctcaattctttgtttaaaggacataaagcatgatatataaatacaaaatatatgtaagcttatcactattcagttgaaaattaacctgtaaacatctacatttttatcttctttgatgattccaacagctgtctctaaaactaagtgtaaggaaacagcagactggttgtggcatattaaattataagtgaggactaatttgaggatcaaagatgctctttgggagatatcgcctgactagtaggaaaagcattagctgtctccctctgtctcatgtatttgttctctctgtcttggaaatatccttccccacagtttctgaatcttgatgtttaattgaacacaaaggtctttgagaaacacaacagggggttgttcctggtagttctagcattgaggaaattgaaatgtacattttttttctcatttatcaaagaagggcaagaatctaaactgacattttatatcaaatgaattatgaactgtgtactttgtacctaagggaacaacaactaaattagagttttagttaagagagagagagagacaaaaataggctttgaataaaacatacagtaatttctgctactgtgcctgacagtgacatggccagatacagttctattgtagaactagtgactggatgcaggctactctgaaatctttaaatgtatttgagagaccgtctcagaaaaaattaaacctaaatttcttatgttgttagactttatggtcagtgaaatagtcttgataatctaaagttaactttcagctttttatcaatgcttactttcttaaaaaaaataatagttgcaaagttttacttcttgagaaagtatgaaattataggttgcttgagagggaaaatacaatgcagaataaaaataatatatatgaaaatgccacattccatctctcctctgattatctgtaacacctacacaaatactacacactacactcatatgttattgtgctcataaagagtgtgaatcctaagatcagtgggacttggttcaaatcttaatttcccccctcctactagctgtaagagcttcggcaagttatacaatcagagtctgctttactttgttcttctgtaaatggtagtaaataataagcactatctcacaggattgacactgagaacttaattatgatgatgcctgcaatagatacaacgtgatgcagtacacatagtagttgttacgttgcacagttgtttccttccctatgtgagaagattaggcagcagcaaattagaactccattatttaatggctgctgattcctgaagtataggaagtattagaattaaaattttaaggagaaggaccctataatgtctgtgcaatatatctaataatcattttttaaataaccaattgaaaattcttgggaattgggggtgattcatgctttcttcttctggacaaagctatgtattgattaccatatttttcttcacaaataagtattccaatttatgcaatataaaaataaaagaagcgttattaatatgaatacatttgttttagacttctaaatccccctaggttcataaacctaaaagtgacaaaattccttgatattaatcccatatgctttctgatgccaatgctatactggataataattttgtgactaaattactagaaacaaataactatcactgatagcctgattacaaattttcttcatataattattgatcattgctgtggtaaaatgaatatcataatttttattctcaaatgttgattctaactctactacttataaggtgaaatcagttcttagaagtctttcagcagtttaaattctgccaatgactattgttttattcttactaatagataatgtgaaattaatggcatgttgaggtaagggatgctgtcttgtccgtttaggcggctacaacaaaatactatagactaggtgccttacaagcaacagaaaagtatttcacacagttctggaggctgggaagtccaggatcaaggtgctgacagattcagtgtctagtgaaggctcttcttcatagacagtcattttctttactctaacttcacatggcagaaggggtgagaagtctcccttgggtctctattacaagggcactaaccgcattcatgagggctacaatatcataacctgatcacctcccaaggctccatctcctaatattatctccttggcggtgagaatttcaacgtaagaattataggagggacatagaccatagcagacaccccacatttaagtattttaatgctagatctagttagtatttgagtaatttaattaataaacttgaatattatatccaatcccgttgttacaatgacttttataaccaatctgctctgattcttcaatcattaaatgactaaatttttctccactattcaaagatcacttaatttcttggtatttgattgtatcttagaatagtggattcaatggcaccatagaggaagagtccaactctaaaatataatggtttattttctacacgacctcagtcattttttgttttgtttttgagaaaggctctcactttgacaccctggctagagtgtagtggcacagtcacagctcactgcagcctcaatctcctgggctcaagcaattgtcccacctcagcatcctgagtagctggcaatacaggcatgcaccaccacatccagctaattttgtattttttttttttttttttttttttttgtagtgatagggtttcactatgttactcagactcgtctcaaactcccgggctcaagcaatctgcccatctcagcctcccaaaatactgggattataggtgtgagccactgtacccagcccctcagtaatttattttgctatttttcttgttggatacattcaacaagggataatttaatgcagtcttcctgaaaagagtggctttgacttgagcttgaatttatttattgttaaccttgctaagcatatcaatttttaatttcacaaagactaaattcttcagtgaattattttaaatgaagtcaatgagcaatattagaatcaaaaataaaatagaattaattgaacagtattgttgtatatattttaaattatttttccaattgaagatatgctttaaacaaagggctcaagcaatcaggtactcaaggaaaaagaatttaatctatgctgcctagaaactaattggatgaatatgatcgtattcaaaataataggaatgctaagaaatgctcttaggaatactaagacgaattcaaatgtcgaaagcaaaggcttaactagagtgtctaaatgtaggaagtctctgtaaggaaaaggaaaaaaatttggttggtggtttgagacataacaaaaaaaaattcttctgggcattatgaccaccaacttcagggcctctaattagtctgacaaagtgacagttctacattctagttgaacaaataatgtatctaatgaaattcaaaatcgctatttttctctgagcacagtgagctgcatcattcacagctttggggtatttcaaaattaacagaggatgacttcagtctgtctgatgtttcttggttaacaaattcactgaaattgtcttgcagagcaattttaagcaattctttaatcttaaaccacaaagagaggtggaggtggaggtgtattaccttggtcctatggatgctaatgtgaagtggaatcttttatttctcaaaatggtcaacagcaattagtattcagtggtgtctttttattctggtgcccttgacccacctctgcccccctttctatattactcctattatatactgtaactggggatattcttgcttcttttccattctaattaaagcattcttagtgaacatgggaaccatttttcatttcatgaagaataattactggacctaggtgaaatctgcccattgggttttatataatttttgacaaatatttgcacgaattttgactgatctattcttaccatttctccgtgaaatgttggagaagttttcagttccctcagaacaataaacctaaatatgtacgtgaaagaccaagataaatgttgtaccaccttcaggttgtatttgctaatgtactttaaaatattttattttgtcactaatataagaaataatgatgactttttaacaatttttttttttatttttgcacatgtttctttcctagtcagagtttgacctaaatactcttctactacactagtgacaaccttgagaaatatcatttatttaggttggatctgtaaaacctatagctcttgttatacatcttgtttcttttttttattttattattattatactttaagtttcagggtacatgtgcacaatgtgcaggtttgttacacatgtatacatgtgccatgctggtgtgctatacccattaactcgtcatttagcattaggtagatctcctaaagctatccctcccccctccccccaccccacaacagtccccagagtgtgatgttccccttcatgtgtccatgtgttctcattgttcagttcccacctatgagtgagaatatgcggtgtttggttttttgttgttgtgatagtttattgagaatgatgatttccaatttcatccatgtccctacaaaggacatgaactcatccttttttatggctgcatagtattccatggtgtatatgtgccacattttcttaatccagtctatcattgttggacatttgggttggttccaagtctttgctattgtgaatagtgccgcaataaacatatgtgtgcatgtgtctttatagcagcatgatttatagtcctttgggtatatacccagtaatgggatggctgggtcaaatagtatttctagttctagatccctgaggaatcaccacactgacttccacaatgtttgaactcttgtttctttatttttctctagagtcctttctcagagccaagggtgtcttgacaagtaaaagagaaaaaagttactaaacagagagaaagagagagtaacagactaagaaagacagagacaatttcttcaaacctctactccaaaaaatcctcctcaaaatttaaacgacacatttgtttaaaacctcaaaattcttgcattctttcaaaacactgagctgttagattctaccaacagtatccgctctccaagttagttctttaggttcctgtgtgttggatggggaagaggtagggaaaggaggctagctaccttttatgtctgtgaggaagggcaaaggtctggtttggctaattttaaacaacattgtttaaaataacaggaacttgaactttggagacagttgctagattcaaacagcagcacaaacccctcattacttgtgtggtcttgtgcaagtcatttatgttatgaagcttcagattccttgacccacctacttcacacctaggactattaggaggattcagtgtgatgatacatacaaagcatttagtccattgcctggtgtacaataactgcccagcattaactctgacattgtagtgtgcttatgtttacaaatgaatatcaagatgttagcattgttcaaggggcaattaaccaaagtcattcattaaagttgttgagttgtttaataaacaactcaattaacataaagactctttaccaaaactttgaactttgttcaaatttcattcatccaaaagcagttgctgagctctttctagccaccaggcataactctaggtcctgtgcaaaacaggcttttggagcagatggcgtgcattccctgatggaactgaaggccctggccaccattgtggtgaagttcataactgcacttactgcatgttctggctggctacttaagaattccctaaggagatattggatagatcaaggtacttagagcttggtttcaccttctagggggagaaagggttgctcttaacaaaaactaggacaataaatttaaatgtgtttataaataatgatgtaagacaactatgtcaatgttgttaaagttggctgttacttttaagtacaaaattgcatattccttatttggtgggattactgtacatagttatttttagaaatcagaaaagttaattgatttactgtgattctctcgttttacaaaaatgcaaattgttttattatataagaagagtccattttagaccaaattcattcccataaaatgaaaacttcttggaaaaacaacaaaaaagaactttttaagaaaatgtattgattggtaactcatgacatttcttttctgttttgctttttggctcctgtgaatctcagaaaaaaaaagtctgttgctactcaggaggctgaggcagaagaatcgctcgaacctaggaggcggaggttgcagtgagcagaaattgcaccactgcactccagcctgggtgacagagcgagactctgtctcaaaaaaaaaaaaaaaaaaaaaaagtctgttgcttgacaatggctaaccttagtagaggttttgtggtacagttcactgatctttttccttcattattcagctttgttttcttgagttttatattaaatgtttttaaaaatattttggtaattatgcaggttaataaattataaaggatatctatagttttccccatctctttctggcattctaatgacatgaatgcagattccttattgatccatataagaatgagctcccagaagtgagtgtaatggaatcaagtagccagaaatacttagtaattggattgtttttcacattctgcactcaacttttatggaaaaaaaaaactcgaatcaaagtatatcaataagatgataaatccattcattccttttcagtatccagtccagtccatttaccagggagtagccaccaccatctgtgcctcaatattttcaaactaaacaacaattgtagtttctgtgcttaaaatattgatggaattagtgattccccatctccttcgtatacatttcagactctttatctgtcctacaagaccagtgtctcccacccttgctgccttgcttttaattcctcaaacagtgagatcaccatagagcttccggcccataacaggtcagcaaagtcttagtcatttaacaggtccaaacttaaataccacttccttagaaagcctttcttctttcaaccaaaattaagtcggccccctttaatgatacctcttagcacctctgttctccctcctagcactttgtgtacattttaactacatattgctttctatttgtttgatgccagtcttgctccacttgacaatattctcatgcccataatggtgtgactctggctagtttgttcttcattatgcacccatcacctggcacgatgcctggcaagggagtaaaggaggatgggtagatcagtttttcagggaatataaaaatgacagcacagttttatcacaaatgtttaatctttctgtatttccatatttatagcttggagattgcatagtaaacaggaaagaggatgaggttttgaatcaaaattctcatgtttgaatcccagcctggcacttagcacaatcacaaagaactgtaggaggaatgcaatactcacatcatctaattcatggtatggctgcaaggccaaatgagaaaaatggagatgcattcaaaaggtgagagctacatgagaattcatgaacacaaagaagggaaaaacagacacagggcctactcgagggtgaagggtgggaagatggagaggaacagaaaaaataacctttgggtactaagcttattacctgggtgatgaaataatctgtacactaaacccccatgacttcagtttacctacataacaaacctgcacatgtacccctgaacctaaaataaaagttttttaaaaagtaattgaaatgttcgtaactcaaaggataaatgcttgcggggatggataccccattctccattgtgtgactagttcactttgcatatctgtatgaaaacatctaatgtacttcatatatatatatatatatatacacgtatatatatatatatatacacatatatatatatacgtatatatatatatatatatatacacatacctactacctaccctcaaaaattcttagaaatttttttaaagaataaaattagacccctatctctcaccatgtacaaaaataaaatcaaaattggttgaaaacttaagtcgaagacttcaaactatcaagttactacaagaaaacattggggaaaatctataggacataggtctgggcaaagatttcttgagcaatatcccacaagcacaggcaaccaaggcaaacataggcaaatgggatcacataggttaaaaatcttctgtacagcaaaggatgcaatcaacgaagtgaaggaacaccccacagaatggaagaaagtatttgccaactatccctctgacaagggattaatcaccagaatatataacaactctataggaaaaaaactaataatccaatcaaaaaatcagcaaaatatttgaatagacatttctcaaaagaagacatacaaatggcagtcatatgaaaaggtgctcagcatcatcaattatcagagaaatgcaaatcaaaactataatgagatttcatctcaccccagttaaaatggcttatgtccaaaaaacaggcaataaataacaaaagctgtcaaggatgtggagaaagggaacccttgtaccctgctggtaggaatgtaaattagtacaaccactatggagaaccatttggaggtttctcaaaaaactaaaaattgagctaccatatgactcagcaatcccattgctgggcatacacccaaaagaaaggaaatcagtatgttgaagaaatatcttcattcctatgtttgtttcagcactgtttacaatagccaagatttggaagcaacctaagttgcatccatcagcagatggatggataaacaaaatgtggtacatatatacaatggagtactattcagccgtagaaaagaatgagatccagtcatttgcaagaatttggatggaactggagattattacattagatgaaataagcctggcacagaaagacaaatgtggcatgttctcatttatctgtgggatctaaaaatcaaagcaattgaactcatgggtttagagagtagaaggatggttaccagaggctgggaagagtagtggagggttggggagaggaggggatgcttaatgggttaaaaaaatagaatgaatgcataagacctactatttgatagcacaataaggtgattatagtcaataataacttaagcgtatatttttaaataacttaaaaaatgtaattagattgtttgtaactcaaaggataaattcttgaggggatggataccccattctccatgatgtgcttgtttcacattgcatgcctgtatcaaaacatctcatgtgccccaataaatatacctcctatatgccacaaattaaaaaaaaattaaaaaattaagaaaaaaattgttctcaagtgattaaaactaagatggctgggtaatttaagctctgtattgggtataagcagaacatactttttctaaaccttgtgaattttttaagtggttacaaaatattataggatcagactttgtaatttcataaatattattattacaaataatgtatccagagcgatctcaattatgaagtcatcaaggatgggtaagaaaattacagagagaagcaataaatctgaatgtacagtgcttatcttcaagtaacttaaaaggaactatgaacaaatgttcatagttttttgggatacattaaatgacttagtgatacttaagaagatactttgattgatgttactaagaaataataaatgagtaaagcatgattgtagttatggtgtgagtaatgatatgacaggatcatgtgatagacattgggggtaagataaagatcataacaatagcaaacacttatatagtacttatgatgtgtactttattatattatgtatatattatattgtgtaaccacttgatacattaacttatttaatcctcccaaccacactctatgaaatatataccatcttaatctttctttcgttgatgaagaaactggggcacatagagattttggtacttgctcagtaagtagcacaatcaggatttgaacccagataagttggctcttaaccaatacacagatctgcctcttttgtgatttaatcaaaataaactctaaataaagacattacaataaagacattaattagctgctaatcagctaattaagttaaaaatgtaaaaagtgctaattgaacataaaggagagtgacaaaagtgtgaaatgttcaggattatctaatataataaaaagcttatcaaaggtaaaaaagttttcattggaaaagattcatgaacaagcattctagaaattaagaaatggtaaatggccaataagcatgttgtaaatatttcaatcatagtcttttggttttcagtgctatctatagactgacaccttccttatgtatatgctcaggcctaaacacatgaactccagtcccccgtagtcaatggccttctaaaaatatcttaggcaatccagaaccaacaaattttttttcttcctacaccaagtgtccctcccttagaccagaagcttaggagtcaagcatccttctttcattctctacatccctacatctgttccatcaccaaatcctctatgaacaatactttccagactcacgtcaatgaggcttctgccttgggtctgcttcatttgtgcttctcccagtgatctgcaaatctcaactcagataaaacctcatcagagatgccttccctgcctatcgcatctaacatgctaactttgctccactccctccctcatcactctcaatgcccttatattagaaatgcttctttttttctcattaaatgttagtagactttatttttaagagcagctttaggttcacagcaacatcgggcagaaggtgcagagttcccatttatccttgcctccacacgtgtatacccttacccattatcatcctcttccacagagtggacctccactgacatgtttttattacccaaagtccatagtatacactaagattcgctcttggtgttgtacatcctatggctttaggctaatatataatgacatgtacttaccattatagtgtcatatgaagtagcttcactgctctgaaaagcctccgtgttccatctattcattcatacagccctcccccaacccctggcaaactctgatcactttttatcgtctctatagttttgcctttatctttttttgtctttcatctcacccctcttaataaaaaccattttaatttgttcattactatattcccaggttatggaatagtgctaggcatataatagatgacttttaaatagctgctgagttaatgaattattatatatatacacacacatacattatatcagtcatatgtaattatatacaaattatatgacatgtagatatataatatatttaatgatatacttgtattattattatatatgtatatatagatatatataggcattatataaaatactcattttgatggggatactgggaagtggaccactcatatcttagtgatggtagtataaattcaatgttctggaaaacaattagtcaactaatatctgaaatagtagagcattcatcaacgtttacccgataactctaaaaagtgtccctaaagatgcatcattctgtatccatcaatgtcagctttgttaagtgaatgttccacatctataaaaatagtacatgcaattatttgaaaagttatgctaccaaaaatactgactggcatatatagtaaagcaaataaagtttactaaataatatgtaagtattcatcttaatgtttttcttaattatgtgcacatatatttgtatagaaaaaagacaggaaagattatctataataattttaccatggctatctctgggtagtgtaattatggatcattgttttcttcatttgttttataatctttaaagtttatatcataaacatatttgtacttaggaaaatacagatagtacttttaaaagagttctgtttagttctccaagaactaaattttatcatttgtttaataagtatttcatgagcaatactaaactctcaaaatttgttaagtgctctgaagtttacaaagataaataaaaagcatatctgctctcaaatggtttatgttatcattaccttggtttatcatgggacaaagcaataattagacttaaatttaaaatttaatggggttttgggagatgaactatggtcttgaaaacaaaagggacatgtatgaaaccacaggtttctatctactattcattgagacgttgcttagccttttctaaactcagtttttatatctgtgaaataagaacattgagagaaacgaatgataaaatgaatgtactctaaagtagtatttcagatttcatttgataatacctccaagcaattaatctcacttatgttaaaaatatttttcacatttttttgtaatttatttgtaaatagaaaatatgttcgggattctaacaattgttgggataatgacagaaataattttctctgcagatctttcccccatcaactcatccatctttcccccatcaactcatccatctttccaaccattgattcatccatccattcatccagtttttataggatctttcctagacaaagcactgtgttgggcaccatggtatctctttaattacttttctcctttaacagtcctttaagactatgtatacattagaaaataattaatctggtatggtcagctatctatatgaccattttgagtcagctacatagctgatatgaatgaacttgatgaactccaatattaagcaggccaaaattaagatgctcagtgaagtttcagcagcatcacttgaagaaaggaaagtcagtgccttcctgtgttgggctgtggcccaaacacacaaggagtgtaagtttaaaaggcattctcaaactggaacacatccaaatcagttaacaaggctagaagatggttgagaaaacatactatatggaaactagttggagagaacagagatgtttaacctgaaatggggaaatttagtggaaaggaaggcaaatgcttaaaaatacctgaggttctagcccacgaatggtaccagaggcttgctctcagggattagaggtaaggttctaaggagttcagtgttgttagcatgaccaaccatatgcactttttgcccaagatagtcccagtttatgcctgctgcatgcagctcagttcactcctattaattacttagagtgccccatttcactcagaatgtctcaatgtgaacaaaaggttatatttgccctaagttttgtagaacccatacaattctttgttctacatcagaaagagctttccaatgataaagactattcaataatgtgatgggacaacttgccaagtgactattttcctgtcactggtaaggcacaagcagagacctggggtcacctgtctgggatgttctaggtaaggattccttatttggtgagaggataaagttggtgacttttaagttttctgccttctgattttaagattctgttgttttgtttttgaatattctatggtcaaatatcagttccatgacatacctacgaaaacacaatttttaaaatatactctttctctcgctaacatgaagacttctccattttacatttcattgaatttctgtggatgttgactaattctggagatgtggcaaattcatactagtagttctgtgtgtgataccttgtggaatgatgggaatccctgctatgataaagaaataagaccgggaggtactgtttaagaatatgacctggacagaaaataaatccaacatttattgaaatttgtttatttaatattgtaaatggtttgcttttatatagatttaatatatttaatagttattctatattataaatcattcactatagcaggctgtttcagggtgtaaaattaagagcgcactgcctttgaacttaaacggcccatgttagaatcctcagtgtgccagttacatcagttctgcgatttgaaatgaaatatttaacttctctctgagcctcaccttattccgtatatcctacaaagagaaaacactacaattttggagtgtaattctgaggattagaaataattatgttaaataaccttgtacacagtatgctttcaaaaagttcgctctggtgaaagactgttttgtgaacatgaaatctattttaacctacttgtcactatttaatgctgctctgtttgtgcatccttgtgttcaaggttgactgtccatttgttagcacatctgcatattcctcataattaatatctttttaaatgacatatggtttagtgactggaaatcgagtcttgccttctgttttcaatttgttcatgactcaatgactcaatatatgtgtctgaactttaattttccattctggaaagtagaatttaaaacccttgctcatatgtagctatttcggaaaatgatgaagaaatgtgtaatccaaggattttgaatatgtgccaggctattcagcgatgcagcatataggtaaaaggccgcagtttctctaatgttaacagagaagcctaaatgagaatgccaaaaatgtaatccctgaagtgaggggataatttggggtaggctagagtcagattcctagtgaattagcaagaagcaccacatctaaatggaatgagcacaggaagagttggtgggagccctagggaatgaggctgagaacatcattaacctggatgaacaactgatagtacccccagggcagtgcttctgcaagccagggatctctgaaagacaaggcccagtgcacccctggaagtgagtttctaacttccgagtcccccgtagcatttatacctcttttgtgctgagtactctttttttggtgatacagttatttgagtcaggtctaatctgttaaacataaagtagattatttgattccgccttctacctattctgccctttccctgcctctaacaagaaccttgtgcagagtggtattcagtgtcttgtattatagaattgaatttgatacaaaatattacaggcttatttgatattttaatgcagcattttatttcactattttgaaatgcacacacacaggcaaaaaacaaaacacacctcaaaagtaacatgttggtgggatgtcctgagaaagaattcagtgcatatggaaagcacagtgaattcattttctccctaaaatattcttcttcttgtccccacagacttggtagccaccaactacgtttgtaaagcctctgtttttgcctttgagagctcactcccagagttttataaatctgcagggagcaaaggtttaggacatgtgtaaataaatcattttatattttttcgtttgttttattttgttttgttttcttagagaagtttaggacatgtataagtcattgtctatttggtgttttgttttcttttgtttttcatatagatgagagtccagtggcgtatatcatttttaaagtttaataaaattatacattcaaaagattataccatctcaattattccaatctgtgatttaatttattgcttaatgttttgtatgaatttgattttctgaagcaggttaaatttgaaattttattaaaaacccacttcctttgagtttatagattgggatagctgttttatctagtcgctgtgtagaattagtatttactggacaagatgtgttgattcaggaggttgtcttggagtgtttgccccgtgagggtcatattaaacttgagagaagttctttgagcaacagagcatcttggagacaatatatcaagctgatggatacagggctcttctgttaagaaaccagcagtggaattatggctggctcccagttattgctttggtgctaaggagcctctaaggattaaatctaggataaaaggggttaaacagaggggaaaggaaggtttccagaattcagtgttactggaagcatacagaatgagtagttatatacaaataatttaagatgaccattctgtttggaaatatttcacaatttaatatattcaaagtgtaccaatttagtggagcatattgttttgttattactcagaagagaattcgtgacatcttattattattataaagcctactttggggcacttcttcctactgtcttaatagaaaggtaatgtagtttttaacacataaggggttttgtgtgcatattaaaaactaattttttcagggctaatgacttgaaattcagaatttggattttcaattacattatactccttgatgtagaaaaattagacaaaaataatcaaaagagagacatggttttatatgttatacattgtatgcattttgcactttattttttgcctgtgttttcacagtgctcttttttctatgtatgcacttattataaatcaattaaagtatatatgtcaaataaattatgattgttaaaaaccatttgtgttcatagataaaaatatcaattaaaaagcctttagcaatgaatgtccttcaaaccaaaaatgtgaaggtaagaagtggatagttggccctggacagcaatcttcttgcactttctagtcatgccacacttttactaattgagagaattatttcatatcatttcctctttcttcaagcctccatttcatccacccaatttgtcactgagcctttgcttttattttgctcactaagaaactgcgcatcatcaaaggagatctttgctattattccatcactgaatctactcactgctctacatcttcatctgtgcattcacttttgcacaatgggagaactatccctgctctgtttggcagccagtgtgcactgactctcagttgattcaaatgtgcactggctcacctctctcttcccacactaggactttgctctggcaattctttcttttacggtatcatttcccctaatctgtgttagattcttccaacaaacatgcctatatgctgcaacatcttccagtctttagaaaaccttcctttgatatcatgagcttttctagctgctgccccattttctaatcccttttagaataaattccctctaagtgttgtctaagctcactgtatctgccctttaccccctcgttgtcttcacaaccttagctcagactgctatgcccagcactgcactgcatctgctctttgcaaagttatcaaatatctgcacttggccaaatgcaaagtttcaactcccagtcttcttcctccttaaactctcagccgagttgatacagctgatacgttcttcctttttcatgtgccttctttctttactcggcttccagtctgcaccttctcagtttttctcctacctcactgaccattccttctcagtatcctttcctagagaggcctcctcctgacctcaacattttggtggattccagggcttggttctcagacctcttctatactcattctatcaacactcacttcctagtttatttcaccatctcagcctttaaagatcacatatatgctgacctacaactcctatgaaggctacaactcctatgaagacttttcctctccctctcctccttagtccgtgttagccacactgttccttaaacacaaccagaatgttttcctccttactgcctttgaatgtactgctatctctggctggattactcttcctccagacattcggatggctacctccctcatgccagtgaagtctctgttcaaatatcactgaattgcattttcttcctataatcttcccatcgaattgaagttgttacctagtaactaaaactgcccaattctttttaccttctctttccttacactgctttatttttctacaaagcacttatggccacctggtattattgtatacacagtattcatttgtttaccacctgctccctccacttgaatgtaagctacctaggggcaggagtggtgtctattttattcagtgctgttcttcttccacatgaagagtactgcttagcacagagtggagccttaataaatgtttattgaacaaatgaatgaattattaatgaactcaaacccattacagcagattgatgaaacatgtaatctaattcttctgttctcatcactggtcattcattagcctcattgttcacagacagcttcttctgaattggagagtatgtaaaattgacacactacacaaggttatgtataaaataaagttgaaaatggaccctgatatttcatttgttctcattattttgatcacttctccttcttcaccaatggcctctggtaatttgtggtcattaggaacctatattacaataatcagaatgttcccaacaaagtatattatactagcaattaaattatgctaaagaaagttcaggtcagtccaatgtaataatagtaataatagttagtgactaataattaccagggtctaaaatcaggtgctttatttatatgatctctgaacttcacaacaattctataaaggaaaaatattatacctactttagagatcagaaaatataggctcggagtcattaggtcattttcctaaaggcagagttttgctgaatttgctttcaagtttctgaatagctttggaacaaactgatatgatttggaacaagctgatatgacaggctcatttgagttataccagttggaaaaaattaattaaataaccagagtcatcttatcaactttttttagtagaataggctttagttttacacattcctgttaggccttctagaaccattcaaagagatttccctggtagattgtaccaagcaggtatgttgaagtcagaacagatttgccggagactcaactagactagaaaaagtggtatgcatgttccaacttgcaaaattgagtaagggcaggagaagggataactctgagaagggtaattgtataaaacacatagggaaaaaagtttactttttatattttcatgggtgagcattaaggctggaatacactgtattcagccattcatgtttatttatcattccagaaaaatacaattttagctaacttcccttcctccaaaaaaaaaaagaaaggaaaagaaagccattgtgttcacatgtagtggtgtgattaaggcagcaatggatgatatcggggggaagaatatgagatctggactgcttcagtgttcaattgtttggtctgttgaacaaagagttaaatgaaaaaggtactttaatatttgcttcactaaattccctccatgttttcaattagataaacagaagtacaggtgggaatgtgctgcatattcatttgtcttgctgtttgggggccggcttttaagactgaaatactaatgtaattgtgttgaaatgaacaataaggaagtacaggagttcaggaatgaaaatgttaaattaaatggaccatgtttaacattgttgttgatcctgaggaacagtttttccagtatatggagcatttcgattccatccagcatatgttctccacagttttctctgctctaattcatctgtgtttttcgacagctccagatggcgtgctgcctcccaggctttcatctgccactccaaccagtcttcaggttgtctggtctacaccagctcgtaataacgctcctggctctcccagataccaactccagatgaggtctggcgactccacccatggatttctagagtgagcattctactttgtccattctatcagctgggttatacaatatagacataacatttttgaagagtaggtcagttctcatttgcaaaaaatataggttaccttttaaaagtacaaaaaaaccccaaacaattagaggataatcatttgctttgcaaaaatatctatttttcatttatgtagcatttaaagtaggatttcttcccactgaaacttttcatgagcacatgcattacataaagcaatgaaactaacaaaatgatgtctgaactgtcgctaacaaattataatacctattctacaaatccacatggcagtcagtctcaatactactaggatttacatctcgtataaacacaagattacagactcagccaatggctacttattttaaaagagatctcatttgatggcagaaaattacaatacttaaatgtatgttgacatcctctaaaatttttttgtagtaagaaatttacttgcttttatttctttgaatgtcgaaaacttcctaattgacatttatttcccatacaggttattttccaatccttctgcatcgttaagctatgaagtgagtgatctccaaccgtacacagagtatatgtttcggttggttgcctccaatggatttggcagtgcacatagttcttggattccattcatgaccgcagaggacagtaagtggtctgaacaatacacagccaaatgtcttctacatagggagcttaaaatgtcttcaattttttccaaagcaaagaaatgagcctcccttatttacttgttgtttagtgacaataaccttttctagggcaagagagtgagcaaaggtggtcagtctctccagaaagaagaataatgtggtcttggagggttggagggttaggcctacagacaggacaaagtaattcactataaattatgatatggccccattctatccttcagggtacatcttagcgccctgcaagagaaaggttgtcatcttctgctttatgactgaatgttctctgtttcggagaaattctggcaggcagaagaaaatgaaatatggaccttacttcatgaggctgcttacatatacttgttcctggaaacaggtttcattttcctgcttctactcataccccaaagacagccttcagcatagagaagtataatctgatagcagtatattacaaaaggtggattaagatttctttattcaaccaataaagagaattttctagttgttcactaaaaagttatttttgcatatatttgctagattatatttgggaataaatacatgactataacatttggttttatacaaattacctctataaaagcatatatatgaaagtagaggggtttttaaagaaaagttagaaattaaatcaagctacacagagtgaataaggacattgtatctttgaacagttaggttttttgagttaatcttgtgaagtcttttaatcataggcttcttaggcaatgttctctgctggcccattgccatgctggctctatatccaatgagaacgttaagtgactttcaaaagcctagatattaacacaaaagtatggtatttgcaacaatatcaattgtttattaaatgtattgttttatttctataatacctttaattgcattattttagtgaagataagacatcaaattagacattatcagtacaatctatcttgtttaaagttgactttatttttacaaaaaaaagccacctttatgagcaataatgtatgttacttaattcatttcttccaattcgtaattactccctgggagaaagttagctactttgcaaggggacactcagtgtttttgttctcaagggtatcatttagtaaattatcagcacagtacgataaatggcacccaaagtccagaaagcattaattcaccaccttttaggaggaacattacatacactctggggaatctggacaccatgatcaccagatttatggactgaagacttcacactcaaaatagatttttgaagaaacatttgaaacaactgaagatagatttgtaatctccttcttatatatagcagcatgcttgatggcactaaataaagattagccaaaaataattattcaacccactgcagaggtgatggctcaatagaatgcttggaagaagggagaaagcattttttttttggcacagcattctttattctcctagagaaagggcaacactcaaacttcctcagcggtaatctccccacaattttcactgaatgagggccatgacctgccatctataggcagggaggtagcacataaataagcaaaagtccaaaatattgtaaaataccaattagcatagcatcctttgttgagcaaacttacctttggtctcctttttactataaaacaagccttatagaccacacatacacatcgttagaattttcatacccagagaccctccattgttgtggtatttagggcttgagtttaaagtgagtggtattaacccttcattttccttaagtaagaattagtaacacttgaataaatagcaggtatcaactcataaccattatttgtgtttaaatccgttccccaaaatgaatgaactcttccttcctctgctttgtgtatacactgtgaagtcacatacatagcaaagaactggaaggaggccatgtgtacctgcaggttacgttagcagtgcacctgagacatggtgacagggtactgtatattttagatgtcagtggagatggatgccatctctgaaaggatatgcaattgagttgacaaagactgagtgattggcattgggcacaagcagtttttctgtcaaggctacaaagcattgcttataaaaccacccatgttgacagctccatgccagaatcacacttcttacttgatcctgaccagcacctcctgctcaccaaagtgcaattttctttctctttctttcttctttctttgtttctttctttcccctctctctctttcactttctttctttctcactctctttctctttctctctctttctttctttctctttctttcttttcttcctttccttcattttttgagacagcgtttcactctatcgcccaggctggagtgcagtggcaccatgtcagctcactgcaacctctgtctcctgggttcaagcaattcttctgccttagcctcccaagtagctgggattacagatgcccaccaccacacccagctaatttttttaatatttttattagagatgggtttcaccatgttggccaggctggtctcgaactcctgacctcaggtgatccagccgcctcagcctcccaaagtgctgggattactggtgtgagccacctcacccaacccaaagtgcaattttcaatgtagaaatttcacatatcgtcttacagaacgaaacagagaagtcgcctcgtgcccacatttaaattccataccatcaacaggcacctttctgcatcagccacagcctcacagctttccagtgccaaaatgggtcaccaatggcaatatttttagtgtgacatttcaagacagtgattttcagcaagcctgtgacacaggtgaaaccacaaagagaaatctaggcaggcaatgagctacagccagagaagcaaatgcatgggtgcagagaagttatcatggacagggaaacaggatgtgaagaattttaatagatttttttttcaaataatttgtcatttacaccagtgtgccaccaatatccagttccatgcatttttaaaaatctagtgtgctgatgccaaataatcataatgcacatttcctatgaatattttaaatcctgttaaatgtgtgttaataaaagatgtttgttccagccaatttggtcagtgtagtgtttaactggttgcaaccagataaatacaaacaacacattattttttaaatgtgctgctggcagtccaagcacctggcatgtccacagcttgcaaaaatgtcctaagattatgttaggcttgggagcatgtgattaataaaatgaaggcacttgcctagcagctgaaaatgttgatatcttgaaaacaaagataaccatcactcctgattatatgattgttccttctctctcgtatgtttgcaattgttttctgtatagtacatgcatgtagaaattagagttggcagggagggcaagtttttcaaacctcagcttaaatgtggatgtattcttttgcctaccgaaatcctgccttgtgttaactatgaattaacctactttttcttaaaattgtggattccccagcccaaaaaagttagataatctgtttctcttaagatttcccaggaaataagattgaaatatggaatatctaatttcagtcattttaatgacaaacatatatggcatacacaagcaattagatcaactaatgaaattgaaatcattttctaaaaatcacttccctaccctcaaaaaaaaaaaccccaaacttgaattcactttagattttaacaatttagttgtcatatatttaaaaatgtttgatcgtttcccaaatttgtagtttaaaattccatatttatatttttaaccactagtctaagaggcactactgcataaaacctgtagaattcgaacagtttattctgtaggtttacttagacaacttttcatttgttcattattttgatgacacagtgatattttaagtacagttatatgctgcacaacatttcagttgatgatgaaccacatatatgacggtggacccataagatgatgatatcatatttttactgtaccttttctgtgttgagatacacacttatcattgtgtgacaaatgcctacagtattcagtacagtaacatgctgtacaggtttgtagcctaggagcaacaggctataccacacaaactagctgtgtagtgggctataccatctaggtttgtgtaagaacactctaggatgtttgtacaacaatgaaatcgcctaatggtgcatctgtcagaatgtattcctgtcattaggtgacacaagactgtaccattgccatgctatatttgctcattgcattacatcttgttattttttcacatttataattgcactgtgaacagaggagagggcaatgaaggaaattgtcttactgcctgggtcctgctttacttttcccctcagcaaccttcatccatccttcagatactcacagtaatttacaaaggaacagaggttcttctggagtaagacagaaaggcaatgtgaggtcaattgaaatctagatctaacagaacatgcttcttcctcttttgttgcctgacataattctacacattcatcaagccccagctcaagtgtcacttcctctgtgaagttttccttcttgttgctcccttagaattttggtttgtgtttactagtgaatcatcaatatccccttctgaattgtaacgtctcaagacctagggatctgtctcaactatctttctatcaccagtgtctggcgaagggtctgatatagagtaggtgccccaaaattcttactcaaagtactgattaaaagcagagtttgattgaagtaaatccacaaaaactcaatcaagcaaacatttaccgtgtacctactgtgtaccagggactaaaagagatatgaaagttgcaaggatggatatgatactgtttttcccttgagatttcctctgtctggcaaggagcacacacagtaaaaccatagttagagtgaaagagctgagttgtccatgagagcaagctcagaggaagggcatggcccctcaacatgagggccaggaaagcctacccagagaagaccaggagaggaattggaaatgatttatatttggagtgcactttaatatcaaagttcaaatttacaccatctccacttgttcagggtaaggctggaaagcaattgctgtaagagagcactgacatatgagacctgaagagggactctcaggttgtcctgtcggtcgttccagcctctgagtatgaggcgaggagggtggggacaagaggtgaatgtaagagagggacatcccaaaagtgattctcatttttttaccttggtcagaggcaggcttctggctgtccctctgattcaatattggctgctgtcttggctaggttaacgaatgttctagttagagaggcttctgccagccccaaatcatgtgctattcggaatgaaggggagggatgtgtagaaagaattctaaaacaaaaccatttttcctgtttttattctcacaacctgtaataagagtaaaatactctgagaccgtgtaacagaagaggaaggaaacatgtggtataaaatttgataaattgatcaagataattctagagtaggacttccgaatcatttaagtgcacatatgcccttaagattactgaaattttaaaactaatattgcatgacaaacatcttatgtttagggcattttagaatttaaagtttcacttgcatccttaaaatcattctacgcaacacaaggaaaatcggaatatttttaaatgagagtggaacatatttatatgagtacattttatttaatgaagaaagaggaactacaagtttcagtagtgctacacaactattttgctttctccattccaaatatttttccagttgccttaagtactaacctctgattgctgacatgtttttcctttcaaacagtaattcaggtatctattttgcatagaacagaagacccatgatcaaaaataacatttataatcttctgattttgagagcaaaatggttctgcatgttttcactacatactttgttttctgttgcatagattttctccacaaattcctgaattttcagaattaacaaattcaaatatttacaattatttttatattttatttttataatgtaagatcaaaaggaacttattcaagccaaaaatgaccaatacggaatcctttgaaaggatggattgattaatcaaaaattctatccaccttgcctcaatttcccacttaagctctcgaatctcccctgggcacttaaagcacactcctcttccaaatatagagtgcttgtaatgtctgtgtttcttacagctgaagactgcaggtgaaagtaatgaaaaatcaagttttttatgtttactttaagaaattaatgaaaaataattttatcatagctgccttattatcactacttaaattttattgagggtgtattatatgcaagacactttagcaggaaaagtatatcctctcattatccagaaatgctatctgctggccttccactatttttaaaaactattcttgttctttagctttgaaaaagttaaattgtcaatatttgaaaactctcagtggactatgtgagatcattcaaagataattgccacaggttgatatttaatggcatgagtttagttttaattctcaaatcttaaattcttagagagtcaagtatctaaaaactgctggttattaacaaaaagatggatgtttaccataatcattttctatagcattttctatagcacctgcctataaaagaacattctgcaatgctaaaacaatacatagattcatttaatcttgttgtcttcctcattttgataatgtacctgtaaacagagttgatttgctatatttggaataattcagataagttttgcccaaatataaggagtgaatgtgatgacctttaggttttttaggatgttttcctgacttcatgaattctcacatcaatgcattttattttctgcaccaaattatcgcagatgcatctactacgattcaccccacaatatgccccagctctagaggttgaaacattctttctaaacaatactctcctgatatcaggagaaatagagaaaaatagttcccgaatattggttctcctatttgcaaactatcaaataatgtccttccaattccaacagccttttagccttcagaggtttctttcattaaataatgttacttatgttatacagcccatttccttttttatcagagtcaggctgaaagttcatttttctgcaaaactgcagtgcccattcttaatttttgttttgagaaataactgttgtaccctctttattatcacaagattaataatatttctttattttattgctcctcttacatttggatcttttattatgagctgtcaaaaattcttttgggaagtagttggggtataaataataaatcgataaaagaattcatgattaaagacaagatagaatccattattctgttaacatatcagtagtgaataacaaaaggctacattgacaattagcatgcaatatattgctttatataattatacatccatatatttgccactttgatttttaattcactggtaaatttaggggatactcatttatggagttaatattaccaaaaagagtttttaaactgagcgaggctttaattagaatggtaaaatattgcttcagggcaacaatgagaatgtaacaagaaaactgactgatcagtcatgggtaactcgaatagcaaacaagtagagaagactcacaaaaccactgaaagttatatacacactcaagttgtgagtcattcaaactgggtattcatacacatgtatacaaatacaaacaagtgtgtgcgcacacaccctttccaatatacacacctgaatataaaactaaataagcagattcctctgttaacaattttattactctattttaggctggggctgaacttttgaagctgatgagcaaaatagtttcccataaaagataatttcatttgccaaaatgaaactactttccgttattaatgttgcaatgaaatggtttgaaatatgagtctgtgatctggacagaaaggatgctcctgttcccagctccaagagggagttctctaaacaattacacccacggagagcgctgtaaggttgtattttcatcaccggccagctgagctgtgtgcctgtcatactcccagtctcccctccagtgacagccgcattgacaacatgttatactccacattgattttacagttaaggagctgattgtgatatatagagattttaagaattcagctgagaggctgacttttgccttttatcattccattaaaattttataaccatctttttcatgtcatttcatccatgaattcttactttagaaagtgatagctactgctgtgagcataacttttctcatgttcagagctttttattgtattagcaaactaccccaattatagttattactcatgttttacataattgtggtggccctttcaaccatgcagttgcaggccagttgatttgtatatagaattagatgattcggcttatcattttaaagcactaaattgaaagagtgccaggagtcaggttttaacacttccctagccaaaggagctaattaagctgctttcagcttcctctccagaatcacacaagttaaaggacccttctgcaacaagagcagcgaatctactcagccagagcaggaagctaataaaatgtatgctggcttttaagggggaaacaaatcatgaaattgaaattgaacacctctcctttcccaagataagagatcatctttaagaaaaggctgtgtattgtgggggtttgaagtgcaagttcatctcattatcatggatgtttcacccataatactatcatcatatgcaggagaaataaaagccttatcccccaatcacagagaacaaactgcatcattgttgtttcttttccctgaagatgctcacagtttgatagttcacatatgaggaataattatgcaagacccagatgaaaaccctaataaaaaatattctgatttttaagtgtatattactctctttggggaagagagggtgagataaggttagacattaaagacttgaatctccaccattgattttacgaaacccaatctcaggggatttgggggtttttttagatttcaaaacaacattgatatcttacaagactcgtacttgcttttctctgggaaatagccaaatctagatgacaagcataaataagaaaggagctgtatccccattttgatataataattgctactgctactgtataccagagagcaaaagtaagaaatggcatagtggttttaagaaagctttaaaatgaaagctaacaagagactgaaacggaaagtgtgatttataccatgactgctggttttagggttttttttagggatttctcttcaaataggatacattaccaaattgtcagaaatagcttgatttcagagttagtgcactataacatcttttgcttcgaaaagtgattatgattctaccatcagtccagttggtgacaaatacgtggatcctgttgtgtgaaagtgtactcatataaccaactattattgcagtcactggccctgcaaagcagtggttgcatttaaaatttcaaccttctttgtaacactgaatcgcatacacacactcacaagatcaacgctgttttaaacaattactaaatccaagtatatcttttttaaagattttcaataaaatctaatgttcacagaaaaatctcataaatgtcaaaattgctgtgggcagaaaaggggggatacagtattttcttgatctgttttagcaatttatagatttcaggccgtggtttataagaatgctaaatgttctggaattacagctgttactgatcagtgattgagccagatttgtgttattgcaccatgttcttgcttgtacctagagagcagtaaagcctcaatataataaaaagcacctgcattttaaatgaaatttcaattgaaaaacttaacagcccttcaaattgcagaatttaacgcagcccagtaaagcttaaataacactttgcccccgcaggctgaggggtttgcattcaaggtgacttgattgtgtcgcatggtgaaattatttacaattaaggaatttctctggagggctgcagaatatttgctgttccacaacacctatgcaggcatatggtgggcctttttcagtattcatggagcctcctgaacctttatgataattgaatcagttagagtgctgagtggagcaagcataaaacctgttaacctaaaggtcagatctgtgcattgtttatttatcagtaggtgaaagagctaaatcggcagcttctgtcacagccacagtaaaaaatcgcctataatattaacagggagtagataaattgcaaaacatggattagaatgataaacagaaccaagtataatatagaatatataatgagagatgctgaaggattttactgggctgtaaaatatgcaagtttgttatgatagtgttattgattataattagttactggggctctagaaaaaaatgtaggggaagctagaactttagtaacaactaccctcttgtatgtttattaaatttatttttttaaatcctcattttttaaccaatggcttgaataaaaagacatgattttgataaagctgtcttagagaggaaaatgatcattttagtttcataatattcaacaagtatttcacacgcaaaatttatgagcaaagcaatcacagtccttgtctttatggcacttatttatttacttattggcctttaccaagtgttcattttcatatccttgtagcagagctatcactcattttagctttgaggagaggtgggacatttccaagaggtctgactttctggatttattttactttacagaacctggacctgtagttcctccgattcttctggatgtgaagtcaagaatgatgttggtcacctggcagcatcctagaaaatccaatggggttattacccattataacatttatctacatggccgtctatacttgagaactcctggaaatgtcactaattgcacagtgatgcatttacacccatacactgcctataagtttcaggtagaagcctgcacttcaaaaggatgttccctttcaccagagtcccagactgtatggacactcccaggggcaccggaagggatcccaagtccagagctgttctctgatactccaacatctgtgattatatcttggcaaccccctacccaccccaatggcttggtggagaatttcacaattgagagaagagtcaaaggaaaggaagaagttactaccctggtgactctcccgaggagtcattccatgaggtttattgacaagacttctgctcttagcccatggacaaaatatgaatatcgggtactgatgagcactcttcatggaggcacaaacagcagtgcttgggtagaagttaccacaagaccctcacgacctgctggggtgcagccacctgtggtgacagtgctggaacccgatgcagtccaggtaagatactgactattctctctcctttgcagacttaggaatgtaccctggattgactctgtgttgaacagagccatctactgactaaacaaacgcatttgttgttttaggcattcactggagaaactgggttttggcctttggcccaaactatcttaaattcgatgtcagtttttcatttatccctgtatccccttaattatattgttgagatgcttccatttgcctcgcacacctgaaatattttgaatgccacaatgatgcttagcttaaccaccacgtcagatttaaatagatcagaaaatgagaagagatgggaaaataaggaggaatgaattagcatattaacaaaattttccattaccaatagtctggtattttttaataatcaaagaatcaaagtaatggggaaagaaataaaaatagcatattaacgggctatccagaaagtgttcaattattcacctcattctattgggaatgaactctagtggacaggataactaccattgttttggctggcatacaaacttcattcaagggaaattagtgtaaccaaacaggagggagttttgtagcttagaagcctcttttgtgtaaatacacacaggcttccatggattcagtcttgtactactgccaaaagcattggtacagtagcttgctcaccggagcacaaaacaaaggacatttgcataacagcaaagttcatctgctgaaattattacttggatctatgttgtgtgttctctctcccccaccaaaagcaaacactaggtgatgctaaacagtgtaaattgttggagaaatttaatttaacctacaaattaaaagctatttttaaaagtctttgttagttttaatatgaagctggtcaaagcaacacacatttttgatataaatatgtgtatagaattccattcattaaacactaatgggaaattaattttaagtacacgatatacgatgtttattgtatgaactgagcaatgtaaagaattgctcttgattcaaaataaaaacaaaaccaaaaacaaaacccaagcatagagttaataatcattccagaaatgactttttttttcaatcttgggggagttttgtaaaactttggtagcagtaccaatcactatgatgcaacaaaacaaacacagtctctttacaaaggcaacactacataatggacattgttctggattatttcgaataaaaatcttataactaggcgttactgattgtggccgatctgaaaaagagtaagtattttcaggccgggtgcggtggctcacgcctgtaatcccagtactttgggaggccgaggcaggcagatcatgaggtcaggagatcgagaccatcctggccaacacagtgaaaccccgtctctactaaaaatacaaaaaattagccaggcttggtggcgggcacctatagtcccagctactcgggaggctgaggcaggagaatggcgtgaacctgggaggcggagcttgcagtgagccgagattatgccactgcactccagcctgggcgacagagcgagactccatctcaaaagaaaaaaaaaataagtattttcagaggaggaactcagtgtacaattctgcttgattcagcatatataaacaataattaaaagtatcagcttgcctggctttttcttcacatttttaccctcttttgattttgtaatatcatccatgaattaaacaatatacatggcttgtcagcctgctagagaagtttagattagcgtggctagaaagctgaatctcataggcactcacctgaggccacaaggcattggtaaccccaagtcaggaatctcaatgtctctaagaaggtgtctgaaatatatgaacatggtacactagtaatattctaaaaattcacactttttattctcatcttataactaggaaataaaaagttatcaatagaatcagcaggaatattcaactgagtctagtatttaatgctatatactatttaaagagtattaagataacatatctgtccttcagtattattggctcacatgttcagaacgatcttaagactttaccgaagtggacgttctcgtgatatagcttagctggtaaacagaggtatatgacagctaaacaacgacttctctttgtaaaatatgagatttaaaagtccaaattgcaaatagaaaatattttatatgaaataacagaaggatagtcattaatgcattggttaagaaattaattcaactatttatcatagagggttgttccaggtattaggatggatgaaggaaattgacagtaatattaacagcagtaacaataataatttcagttctattgacatttacggaacatcagtacatgagtgaacatctttgtaagtgcctcttttaggcagtagggacacagaagagatcaagatgaagtccctaggctcatggcgattacattttagacagaatgcaaacaaataactatgtaatatacctggaagtaataaggacttgggggagaagaacaaattgagtgtagagaaatatggaatgccagctgatagggtgggggataatacaaggagcagagttggtatttcaccttagtgttactcattttgtgcaatgtggtttttttctccatacaatgccacctgtaagaattacagtccaatagggaaatcaagagagacaacacatacttaggctaactagaaaataaatgcaatgtaacatattagtaagtactaaaagaggtgatatgacttggtataaatatgagccttgagaaaggcaaattggagagcacagcagcatagatgaaataatatgcttaaaatcttatttgattacaagaaaaataaatatataatgtcaaagagttgtgtcacctgaataagtgaaagccatgcacttttatttaatatttaatcacctaagaaaatgtatttcattttataaggttggtaaaaatgctctaccaagacctaaaacagttcaatgaaactatagactaatttcatttatgagtacagattcaaaatttctaaataaaagattaccaaattgaattaagcagtatattaaaagaatgatatacaaggacaaattgatttcattttaaaaatgtaaggatggttcaacatcaaaaaatctatcaacatatgtcttacatcaaccaattaaagtagaaagcccatatggtttttttttatcaatagatgcagaaaaaaaggcatacaattaagaagttatttctaacaaaaagtcaaagtaaaatcagattaggaagaaggtacttaaatgggataaagtcaatgtataaactgctgtactgaagccttgaattgaggattgataagaaataacatgtataaataactaagttgcatgactatgatgcaccaaaaaaaagaaaaaaaaaacttcttttatgataacatcatgagcctgtaaaccttgatgcccctgtccactttttcacaggtgaagcagaataaaatagagtaatcctgcagctgtcagctcctcttatacagtagggtcctcactcagctcagacaggtgaagccaccagccttggcaggtgcgccacaaggaacagtgtcacccagaccacaaacatgtgtagcttccttccctctgctatgtacacttagggtcactcatttatgggtttgataataaagcaaagtaaaagaagttgagtcttaatcatcatcctcattgacttttaaagatgggccaatgtttgatgtctacttaaaataaaccacagacaaaaagtataaaacagaggaaataaaataataatgaaaatatattcactgagttcatgttatgttctagaaattgctttcatttaattcttactacaactgtgtcagatagatgctattgtcattcccattttacagacaggaaaactgagaatgagggattaagtaatctgcataagattacataaggagtaagagttggaattcacacccaggcaatagggttctggagcctatgttcttctctacttctttacactgcaacaaatggaaaaaaagtgcaatcttcctggatggaaggacttaactccataacaagacaatccttccaaagtcaacatataaactgaacatcattcaaatcagaatgccgatgttttttgtttgttttatttcaaactggataaaataattttttattttttattttactttaagttctgggatacatgtacagaacgtgcaggtttcttacataggtatacatgtgccatggtgatttgttgcacctatcaaaccctcatctaggttttaagccctgcatgcattagttatttgtcctaatgctctccctcccgttaccctccaccccttgacaggccccagtgtgtgatgttcccctccctgtgtccatgtgttctcattgttcaactcccacttacgagtgggaacatgtggtgtttggaacatgaggtgtttggttttctgttcctgtgttagtttactgagaatgatggcttcaaggatgaagctggataaaatgattttgaagtataaatagaagactaaatgattgaaaatattatagaaaattgtggaagaataatgaggtggtactttctgtagtatgtaaacttactttaaagccattgagttataataatatggtattggcatgaaaaagacaaatggtcattggaaccaactagagagtttaggtatagataacgagtatttgttgaaatgacttattgtaggtagaatctgcattttatttcattggtaaagaatggtttgctttaaaaaatgataccagcccgaccaactatcaatgtgtacggaaaaaacagatccctttatcatatcatattataaataaattcccataaattaaaaatgttaatgttaaaaaagtaaaaatcttagaaaaaaaggagaatttcatgtaatctaaatgtaggggagcactttctaaagaaaaaaagaaactcagtagcttaaaaaaaaaagatagctatatgtagctagaaacaatctgattgattttctaaggcataaacttcccccccacccaccaaaaaaagttaacatccaaaagatagatctggaaagtacatctgtaacacatactacagacaaatcaatttcaccttaatatgcataggccttctaataatttataatacaagatactttaatagaaaataatttaggtaagaggatatattaggttggtgcaaaagtaattacggtttttaccattaaaaataatgacaaaaaccacaattaatttttcattcatacctcacataaagtcaagggagtgaaaattaattaaagaaacaagtaatattagcaaaaacgaatatcagtaatttcaagagtttgtggaggcacagatcacggataatttcattgtttatgataaagtgaatttccccaactttttaagaaagtagtatatcaataatgattaaaattaaacatgcattttccttttggcatggcaatacttggtaatctttccaatatgaaataaacacaagagcacatattgcatacattttcaaattttatttttagcataaaataatgtcagtaggattaacaaataatttgttttcaaccatgaaaggaatattatgcaaccataaaaaataatagggtgtgtccataatcaattaagtctgaaaagcaagttccagcataagtggtagagaactttttttctgtgaaaagtttttaaaaaataaaagagaaagagagagagacctaggatatgcaggagtatatttgctttgcttgtacgagcatacaaaaagtatggaagaataaacttcagactattaagttttcacctgagtgaaataaaacagagccacaattaatgtttcttgtatttatatatttgtactctttctctgtctgattgaaaaaatacaaatagaatatttgaaattaaaaattaagattaatatttttaaaggaaaggaagacattgtgaaagacaactttatttcaacaaatatttattgcacatcttgttctgtatgaatttttcaggggagtccatcataagaggaattactacactgtacggagtcaaatattcccacatgatctttctttatggtacatttttatcttctattgacaaaatactcttagaattatgcaatcttatgtctacacacgatggcaaggattgtctcatcacattagacatgagggttccgaggcctggagatgttaaatgttttgcctaaagccacaccgctttgagacatttatcatctcttagtccattcttaacccatatatcaatctttataaatgctcttattcatgaagttcttcaaaatagtttgatggagttaaagaagtgaggaagttgcttactatgcttttgggtgttactcttttcaagcctgaagccaatcaactaacctgcatgtctaagtttctgcttaaaatggggaactttgaaggtgccatgattctttttagagagacttttcagggatgtaaaagagctgctgaaagtcaatcgttccttaaacacttaaccggcaatttagccgtcctattttctgaagacttacaataaacagaaaaaatggaaacctgaatcattaagaaccactcaaataaaagaagtcattgtgataggaaagccatctctgaaataaacattttatttccagtgcaaaactataattctatttaaaagttttaatgtaatattattgttttaaagaacacatttcttgcttattcaggccaataacatgttcttttgtctgaatttttagggatgcaacaatatttcataatctttcttatgtacaatggatatacaaaaggtcataggaaattaaacaaactgaaagttttaatctcatatattttgaccacatatacaataataaatgtggtcttaagcatagaaaagaatagaatacaatatttagttaactggctccttaaaattcttggacatgggcagggcgtggtggctcatgcccgtaatcccagtattttgggaggcaaaggcaggtggatcacctgaggtcaggagttcgagaccagcctggccaacatggcagaacccctctctactaaaactacaaaaattagccgggtgtggtagcacacgcgtatactcctagccactcagggggctgaagcaggagaatcgctcgaacccagaaggcagaggttgcagtgggctgaaatcgcaccgctgcactccaggctgggtgacagagtgagacgctgtcttaaaaaaaaagaaaaaacttgaacacattgattaattgattgattgattgattgagatggagtttcactcttgttgcccaggctggagttcaatggtgcaatctctgctcagtgcagcctccgcctccctggttcaagcaactctcctgcctcagcctcccaggtagctgggattacaggcacctgctaccacacccaggtgatttttggtatttttataccttatacaaacattaattcaagatggattaaagacttaaatgttagacctataaccataaaaaccctagaagaaaacctaggcaataccattcaggacataggcatgggcaaggactaagtattaatggtttaaagtgttgccaagctctgacctgaactctcaaagtattctggtctaagaggcaagaaagccgtattcttcagattagtcaggttgaatttagctgtgatagctcttctttttttcatttctgttacaaataccaggaagctctctgagtttgaccttgactcattttccgggtccacagacagcattgcacctccaaaacaaatagcgtcctatatctgtgctacaacctttgctagttttagggtgtttttaaaaatattccccacatccaggcaaatcctctatgtttataaggaacacatctaaaacttctcttcatcccagcctctcttcttagaactctccaaaaagtttttttaagattcacaatgatttcatcccctgtagtataatttggtagatattggcccattgttaattataaattaccaaagtaatcatcaagcaattgtccaactagcatgtggtgagagcccttttgtcaccaattattagtaagaatactctttaaaaaatctcaggtcatagtcttcctggatgaaaccttctccctttgatttaagatagaaaattatggtcagtccttctccattttaatttctatattgctcctctttggtttgcataggggtacaaatgtacatataaatatgtcaccttgtagaaacctgtctcttaaagtttcaaaataactgtatgctagggaaaaaaatataatctaacaaaacatgactctaattactaactgaactccacctctgtgcacatggtactaagtgaatgtagagtttatccctgctatgaagaagcttacaggctgggacatgagatatatatcctggcatttatataaagagcactagaaggtaccaataaaagagatgaaagaggataacatgtaaataaatgatttttgtcatggcctgtgcacattttttaggatctctttccccataagaacatgagtgtgttaccactatgctcctgtagagtttagccagaaaagaaaataaacttcagacattctagaattctactacaaaatgttgttctttcttctgatgctcaagtccacatgttagctaagcacaaacatctttggcttccctttttcaaagctttctatacattccttatccctgagaagaggatgtgctattaatgctttaattgctaagttatatataaataagattcaggaactcaattttgcatcttcggaaaatatgaataatgatttctctttcccttcctccaagaaaaagtgacttatttggcagtcacactaacagtgcaaagaaatgagttctgatgtttcatttagttgagttataaacatgaaaaccatcaaatcctatgcaaccctattgaagcatgtggatgtgtgaattttctccatgtgtttgctctgtgtccttcagaacacccacagtggcgatgaatcgctaaggtgtgtatcagtctgacagtcgtagaaagtggcaagactgaaagccaaacccaggaaacagcatttcatttagctcctggagtactgctaattgatctcaaacccttcattactgtctagtccaaaggcctcaggagaatgtagccatttagaaaatgacttaactgaaaacaagagcaaaattctaggcctcgtgaacttcaattgctctattcctgtatcgtcacactgattctaagtttatctttcatttcaggtcacttggaaacccccactcatccagaacggagacatacttagctatgagattcacatgcctgaccctcacatcactttaaccaatgtgacttccgcagtgttaagtcaaaaagttactcatctgattcctttcactaattattctgtcaccattgttgcttgctcagggggtaatgggtaccttggagggtgcacagagagtttacctacctatgttaccactcaccccaccgtacctcagaatgttggcccattgtctgtgattccactaagtgaatcatatgttgtgatttcttggcaaccaccatccaagccaaatggacctaatttgaggtaagagaaggtgactatgatttttatgttgctgtagtccttatctctctgagaagtagggaaatgaaggaggcttttattcctatatgaacatagaactaatttggcattgaatatcccctgactcataactttcatacactatcatactgtacacttcaacttattatggaaacatcaaagtttatcaatttgaagaactaaaaacccttgaaaccacaatcactattgtctaaggattcgctacataatccatcacttcattttcaacatatgcttttattatatgttaggcaaacctgatgtaggttctatatgatacatttgcacaaatgtacctcagaattctaaggctaacacagtaattctttggcatgttgttagcttatggaaacttgtgaggagtgtggtcagggagcccgatacgatgaaagaaaagagctgtgattcagaaatggttttgcaaccacccaaacttgatacttggccaagaatacaaagttgataatattatcatcgtttataaagtattgatagtcataggaaaccattaacttgataagctttgtgtatttctactttgtgcgaaactggcagtaaagatttggcacatctaacttagaagaaatctaaaatgctatcattctgggagataatagtaaaatgcgaatgtaactgattcttcaaaatattaaatatatggaatttggtccagaaaaaaaaacgttcatctgaaacaaaaccacgtaactgtaaacttaagatgttattctttatgcttccacgcatatatcacacgcacatgccacagaacagcctgagttttggtaatctcaatatgagttgagataatcctgatgttcctgcttgtcttttgctttagatatgagcttctgagacgtaaaatccagcagccacttgcatcaaatcccccagaagatttaaatcggtggcacaatatttattcaggaactcagtggctttatgaagataagggtcttagcaggtgagattacaaaaactataaaaacaaatgctggcatttagttctgggcatgttgaatagttcaaagtatctcagtgtcttcattgtgtgagcgtgttatcagttatgcaataaaacatgtttggttattatctgtggcattaatcacccagctgtaacagtcagcatgtttaatgttttccatcttaactgcatgcttaaaataagccttttgaagttgaacttgtagatgttcaagccttaacctattgcctttgtcacggctccatctagacataaaacgttatggaagaatttggaaatattgaacacatacaaaatggggaaaattcctgggcacttgtagaatgcttgctatttctagaaatggcttataaatgaattataatgacttataattgattgtaagttattgattcagtccgcaaaagaaaacattagtgaacaggattgggacttgaaagaattcaatctagagttcaaagacattcagtaaaggctaataggtgacagtagaaaagggtgctacatgggagagttaggagatctggttctgctttagcctgtgctggagaactagctttgtgactttaggccacaaagcttcactacttaaaaatcacttaacttctctgggcttcatttttgttgtccataaaatgaggtgattttatagaattaaatgacttctaaatcttcatgagttcaagcaatgtgattaaatttcagaaaacatgaacgttattttatgaaaactcctcgatcatatgtttcagtaacttttctatgtgggtcattatttttctagacccaccactgggtagctgtagtctgaaccctgtttaccattctagccttgtctcccatccctttcttaccaaggcctctgcattccagccacatttgtattgcattcagtacctccaacatacaacacttgctctttcagcttttccccatagttgccttttcctgttgcctgactagatcatctgccacgtcttagcctggaggtttcttcctctaggaggcctttcctgccaacactcttgctggtctgattcagctcctctgtaacatttccataggacatcccctaacatatcactattgtcattgtagtgtactggcctgactgcttgtctaaacaccacgttatattatcagatctaccataaggcaggggtgcggtcttcgtgactctgtcttcagttcctagcatggtgtctggcacataccagcacatagtgccctacacctgaatacttaaaaataggttagctcaatcaagaattaattcactgctctgtaccttaggaatattagctgtagtgttcttctctctggggaatggcaaaactaaggaaaattctcctgtcctcttaaaaagttgtggtgggaaaacatcctagttcttgtaagattctcagagagaggcatctcgtaaatctgatcaagcaacagaatgaactatatgaaactgccacttttataggtgaagattggtcaattactagcagatccatgttgcttatcctaaattataatgctcattatactattctcaactacttttaattcattatttacttaatttggcatccctatatgattatcacttcagtagaataaattcatttatttttgcttatttgtgcttactgtgtgctgaggcactgtgataaggaacaaaagataaatacatcttagcccttgacctcaaagaacttataatctagtggaggaacccttccccccgccccctccatagagagtgtgatataatatgtatttttatatattatatacattattaattatatataataatcaatatatattatatatttatatattgattattatatataattaataatatatataattaatatatatattaattgctgtcctcagagttatctacaaagtcaccaattctgcctaaagaaatcacttcaaatagtagcttcctgtgacctatgaactcttaagtgcttaaatataactatttcaaaaaataaatagaacttgactctttaacattactgaatctgagttttagccatgagctactcagcaaaaacaaagaataagtttccaaaagttaattttgtttctttatacaagaaatgaaaacttattaaataattaggaccaaggccatgaagttagttatgaatttttagtgattcctctaaggattcttaatgagaagttcaaatctaagatttcaggaaaaaataaagtgaatttccacaacttaaattgaaacatgaattgacataaacacacccatgacagctgcttccggaagggaagtgtgcagataacaaaattgtgttaaagggatattttgactagtttcataatgccaaatgtcatttttttccggtagtacttgcacagattttttttatttattaaaataacagctacaacttacattaagcttgtagaaaaaaaaaaagcatttcttcttaacattcagtgtaaatggcgtgagtctttataagaatctctttttctagccctctaccctttataagtccataaaaagctaggagtgcctttagcccaagggggagtgtcttgcaaatatgagagaaaaccaaaacttgatcccctggcgggcaggatatttttctctttaaaggaagtgattttgtttggttagatggtgccactggccaccttggcaacatccggggctccttgttcctgctggtcagctagtggtctgtcaaattgcagagggggatgaagctgagtgttcatcatgtgttggttcacccctgtgttactgttccttcatggcccttcctttgcctatatttgttttgctgatttatttgtttggccaggtatgttttcctgggtttttaattgaattctaatatctttgggaggattatgtaatttcctattctccccagattccaccatcccaatttccttcttaacttaacgtctgcataaataaaaggagcactgaagtgtttcttaccatcttgacttgaatatcaccatagttacatttagaatcagcttttaaatggcacttctcctgatataaaaagtaaaattaagattcactagacatctctttatgaatatatttgtgacagtaaatataagttgaagccaatttcctagttcaagtggtctattttggctaagtatgtgtttataacgcatagaaaagcaccaatttaatttaaaacatcattatatttggaacttcagatcattctagtagttattttttcttttatatctacatgtacaaaacagtctcaagtcaattatccagataatttaattctaacaaaaatactttttgctcttatgattatcttaggtaaggagtaatttttgtctaaattgcacagctagttgcctcattatcgaattttgctctgcctgtgtagacacgaattccgtataactacaggtttatactgcttgtcagtttctaacttttcttccttaataattccttgcaaagtgagcaagttatggttgttgggggaactataactttgggtttcctgacattttcatcacttagaaaatctggcgaacgtgctgttatcatctgaagctgccgaagtgagtcaggcagggtttaacaagagggcggcgacctccttcattttaagcatcaatctaccttcacaattttcagcacctaacaacactgccttggttcctaagtgatcagataaaactgctaagaatacaatgagcatgttctccttttcgttgtggatttaaagaagaacaagttataataaacaatagggttattttactattatagagaaaatattgactgtcagattataatttagatttataaattagctttcattaagtttatgaaggaatgtatgttctaattgctattccttttaattatttatacatttctcagagtatttttttttttttttgcaatgacaatttggatggagacctctatgtgattcctcgagaatccactaattgtattacatttaaattaaaacattcaaaattaacacattttcgtcttatttttcaaagaagggtaagacttaagatgtaaatgcttaagctaaatatatcataaattctaagtttaaatcttattgacatatattttcatatatatttttaaatctactaaaataaagatgtttcaagtcctaaaagaggatgccatttctgtgggggataatattcaaaagaacataacttttgttcctcttctttgtaatgagattaaatatgtatagatgacatctgcatctttgctagtatgaaagactgggtcagttccatgacacgtgtttctataatataaataatgtcagattgtagctattaagtgaagaagttaactttgtacatagaaagggcaagtgaaaggaaagcttctcccgtgactaccaagatgagatagatcctgttaatttattccttaatatgggaatgtgaataaaaattgagtctaagaatgaaagccaacttctgtcaacactagtatgccatctcatagccatgcacttaattcaaaaggagtaaacatgtctttcacattcaaattaaattggtcacagtgttttttcccattggatttttttttcaatgccttacatgccctacacgatgtccttttctgtgtcatcatattatgtgttacctccttgtattagcccattttgcaatgctctaaagaaacacctgagactggataatttataaagaaaagtttacttggctcatggttctgcaggctgtacaagaagcctggtgccagcgtcttcctctggtgaaggcttcagggagcttttacccgtggtggaaggtgaaaagggagcaggtatgtcacatggcaagagagggagcaagagggcgctgggaggaatgccatgctcttaaacaaccagctctcccctgagctaatattgtgagggctcactcactaccacagggatgacagcaagccattcataagggattcacccctatgatccaagcacatcccattagggcctacattcaacattggtgatcacatttcaacataagatttggaggggacaaatatccaaactatatcactcatgaaaaatgaacttctaaatccagaaggatgtgttttgtcacaggaggtttttttcccctagtgttttcttagaataaaaaagcagaaaaactactttcattggctgtatttctttctcatggtgatgacaaagtagaacaaagatggaaattactgcaaaattatcttaggtctgacaattctggtagtgtagatatagatagcaacagaaacataacagcttcaagtttcactcacaatctaaaatgtctcatattaaaaatattcaagtgtgatcaacattactcttcaatttttgaagcaaaaatcttcaatactatttttagaatcaacaaatagattttttaaagtgtctaccatcagctgaaaattttaatagctatagacttaagcaatggaaacaatattgcatttcatttttctttgtttgctattcccacaaaagatttgaagatgtaaggaaaagtatgatttatgagatttctcaaatccacacttgtgtgatggtgtactgaaaaatactttgggttgtggcagagatgaggaagagttagtggaagaagcaactaaataacctgcattttcagaagcgtgatttatattggtgacaatattaacacatgaattctgttaggacatcaataaagttgacacatttttaattctgatgaaaataaccccaggcattctgcagctgccctgaagaattttggtttcccacaatatatcagtcccttccaagatacaagccttcacatattttgccctggacaaatgtcttcactggataaaataccacttcttatcaaaacctgccccaaatgttacctcctccgtgaagacttcccagctggatatggttaaattagatgcttcatctgatgcgtgttcaaagaataaggaataaatgaataaattagatgttctcatttaaaaacatatttctgtaaaattttatatacattatggctccaggtggacagataacaattttattatttttaacacctggcatattggtaatatccaataaatattaaatgaatgaacaaatgaatgagtgaagtgatgtattaaatatgaaaaagcaatataatttgttttcaatatatttttaaaagcactttgctaagtttcagcagagatattctttctattggacaggtagatttttatctcactaacctaaaaaattatataagtgacctgaaatttttgagactgagtgcttaaataactatgaaacatctattcattcatttataaaattatctattcagtaaataaacaaattaaaactgcatcatttaaacataatctagttttctaattcattggagtaataacacctgaaccttgaaatgaatattgttccacaagtaagattttaacacatattattttttatgaggaaaattaccatagtcatgtctataccataataaagtttacaatttgctgtttggggagtggaggagggagagaccggaggatggtctcaagcaaatgggggaaaaactattgtaatagtccaagtattcctaaatggacccaaaaacaattggttttactggctacatcatagactcaatataagtattcacttactttgaatacttatattgcaaaagttttttcctacagagtttaaaatggacatttttcaagacatgcctagagaacacactttgtatttagagaagaaattgattgatacacataagttttgtcataagtatatgatgttaattgatctagcatttttgttttaaaatgtattcttttatcatttattaaatggaatgtcccatttaatatcaacaatcaacacgtaagtccatttgaaaaacagtatacatagagtgaatggaaaaccacttcaagccaactaatacattctttttttgatatgaagtggtgaaatgtgaatcaacatatatatgtagacaagccataggtatatattcttactaaatacagattggaattcagatgaaatgaaaacagtatattttagtatttaagaggattcaggatcttgtttcctcggccaggcgcggtgactcacgcctgtacagaatcccagcagtgggaggccgaggtgggtggatcatgaggtcagaagatcgagaccatcctggctaacacgatgaaaccccgtctctactaaaaaaaaaaaaaaaaaagctaggagtggtggctgacacctgtagtcccagttactctcaaggctgaggcaggagaatggcgtgaacccgggaggcggagtttgcagtgagctgagatcgcgccactgcactccagcctgggcacagagcgagactccgtctcaaaaaaataaataaataaaaaaaaaataaaaaataaaaaaaaaatcttgtttccttaaaaatttaacttaacaatgaaagttaaagtacaaaagacaaatgtacggcctcaaatgaaatatctactgatttctcaattaaatttttaaaaagtggaaatagtgtaatattggaaatgaataaaccctatgtccagctaccccattaactagttgtgcaaacttacacaaatccacttgtttctcagggtctcagggttttttgtttaatctgtatgatgtagcacacactttattatttgtagcagataaactctaaagccatctcttactctaaaattttagaaccaccttgaaaacaggcatgcaattgtgtgtatctatgtggcctgagttttgtagacgtaaattgtgtatttcgccataactaaattattgtgaaatctcttaaagtattataaaaactaaagccctatagaatttatttacaatcaaccattttagcgccacctgatattgttaattccacatgtaggaaagaaccacaaacatggtatcactttaaatccataaagattattaattgtataatagcatagacatgtggaagaaaaatttacatattataggagaggaggctaggtatccagactctagctacatttcttttaagtcattttatgaagtaaaatataattataagtattttacccagggagagagctaatgaagccaaggtcgctggttcaattcccttgtgagccattagcttcatttcattccattgtcataggcttgctaccctcttaaccccgactcatcatccttcatattcatactattggttgcaaaggaaatttggccagactgtttgaatgtgtaagcaaaaatctattccctctgctagaaaaataacgcaaagttcaagccttagtgatatgacatcatccaagtatggacagaacagattatcattatgattgttattattactattattattatcatcactattatgttggcagtatagcatcatggttaaaagagcaggctctgaaatcagactgcctatatttgaatctcagtcctcctacttattatctcaatgacttggacaagttatttatctctctgagccttgtttttcttattttcaaaataggtattataatagcaccttatagagttttgtgaggaatgaatgggttaacatctgtagaaaatgcctgacagctattaagtaactattattattttttagttgtctggattatgtggactattcagcacttgctaaaaagcatatgtattcattttccagggctgcagtaacaaaatatcacatactgggtggcttgaaacaacagaaatttattctctcacaggtctggatataagaagttgcaaaccagtttgtattctggaccagactcccttccaaagctctgtagaagaaccctttcttgcctcttccaacttctggtagccctaggaaatccttggcttgtgacagcataactccaatttctgtttctgtttttacatggccatcacctccctgtgtgtatccatgtgtctataaaatttctctctcttttttcttccaaagacatcagcattgaatttatggtgctgcctaatccagtatgacctcatcttaacttgattacatctgcaaaaaccctatcttccaataaggtcgtgttcacagggaccaggggcttgggcttgaaaatatctttttgaaagatacagttcaacccactacagcagacaaagcagaaataaaagaggcattaaacacctgagaagagatggtaaagcagggaggtgtagaagatctgatgcaagcacatatttaggagaaatagataaatagcctcaaaaagtcactaagttttacctgtaattacaatagagcaacacctttcaatgtgggtcaggcagaaacctgcaaacgtatcttcgggctatgaataagaaacaggatgagtcaagcagatttcttctacctaggtggcagtaaaatgctctgaggatcctgatataattttggtcaaattatttaacacaatcctgcaaatggcacctacccacccatgccacaccacctttgcatcgtcaaatcagagattgtgacatattgagacaaatactgtgggccttacactggagatgaggtatccttgatcatctaataaacccaaattaggtaatgatctgaggccagtgtttgccctgtgtcctggatgcctctgggatggtcgtgtgttgcactacatgtttaagcaagtatctcagtctaagctattgtccactcatagactgactgtgtctgtttatggcatttccttacacaggtagttctgaaccaagcaaaggaagcctgatggtcttctgcccaaaactggttaaaaaaaaatggtggctttactctatagtcaatttaataaatgacttggaaagtcctcctcatatcacatcagcatgtcagtttttgccttctgcaaagtaatattcggtttccactgtattgactcaagtaaatatgttcacactatggcaaaatacagctcactgtagcaaaactctcagcgggagaatgttgtacactttggtcacagttacaatttaatttaggggtttatctgtctgcagtgagattatgggaaagaagcataggtatcggaagaaaatgttgatgagggattctgatatttgaaaatggatgagtttccaaaaagaagagcataaaactctctggatcaaattcagatagaaagctggcaggttgcctgatttgtaattgcatcttgaattgagctgtaatcctcaccacttctgaaaacaataagaataagaaaatgataaaccacatttgttttcaatagcaatatttgttcagcattcctaataaaatatttccctgatgttttggtttatgctggcaagtcacaaaattaatgatatgtgttgtgtaaggagggaaaataaaataatgtattttctagggaggaaaagaaaacagtattttgtagaggggtggaaggaaatcctgtattttgtgaagaaaaaaagaaattatttgttagattttctgtaaagtagaaattcatatactttttttaacaaaacaacattttaggtttacaacctatgaatatatgctcttcgtacacaacagtgtgggttttacaccgagccgagaagtgactgtgacaacgttagctggtcttccagagagaggagccaatctcactgcgagtgtccttaaccacacagccatcgacgtgaggtgggctaaaccaagtaagtaagcttctcatacctgtgttaacactttgtgtatttttaaaagcatattctttctttactatgaacctcccccatgtacacatcattttgatagtgaagtgttactggtaaatttttaccaattgcagattgacagggctgtcattgaaaactttagaagggccatttttattagtacccaaataaattagaaatggacacattaaaactaaaaccctggggcccctgtgccattcttaagatgcaaactctctcctactttgacattgttcttgggcctcctgctctccctctgtcatttcctttgcatgaacaacgtaatttctatcataccaggcaattgtgatagacatgtccatgtattaattggatacaatgtactattgttcaccttccttcagagagctctgccctaatatcttgtaactcgtcgctcattagcaagaaccatttaattggattgcaataatggaacagattcttcccagtggatcatcttcagactggctatgggcagaattccagcttgatccagtaaaaggaagcctagacatcaccactggatccacttaaataatgcagggtcgaccctggacctgctgggaacacttttttaacaggcatttggaagagttcacagagtaatctaatctgttcctgcaacgttagaaaccacagtaactgaaatttcacagttacttggtcagtagggtagtattaacatgttaatttgttgtgatctgttaatttgtgtcaatccctgacgactatcaggaaaaaaaccctgaatctaccatgagaatatgtattaaaatcagtcttataggtataacttgagatctggcaaatagtttcatcaaaacttgtcagaataacaccaaatattgagaaatacctgatcaggaaagacccactcaaaacattttatttatgaaagaacactctgctcactggggtaatcatctattgatgatataaaaagatgaaaagtcactactggttgggcaatgtaaccatgtgattttggttacactggatcagccttgaatttggttacagcttaagaagagagatgctccatttaggacacctgagtgatatcaattgtgaattaaagccagaattgaggatatcaattgtgaattaaagccagaattgaggatatcaattataaattaaatcagtaggttaggtttatctgtgtttccacaaaataatccatctttacaaaagaaaactgtctttctctggtttttataaggctgcaggtttctaatgatctgtgacacttgtattgggatctcttaaaccattttaatggaataatataagttaattgatgcttatggctaccctctgaaacacctctgggaaaaatacaaagtttttatctggggatgtgttttaaggcatatttccattcatctccctcttgctctctactccacctcactaactgattcatcttaaaagcctactcataaaggtaggctctcccccctcatctgacatttgaatacttctgttaagatccggctggtgaatttccaccaatataggtcctttatgttataattgcattcctgaagtaactgtgcttataaaaactgacaaacctaatagatctgaagcagctcactgaagtttcattaccttggtaatctgaacctctgaccttcgggatgtaggtaatgcaatctgctgttatttccattcataccttggaaatttttcagataactatttgtgagcacaaaggttaactctcagaagagggtcagtcttgcgaaagcttgttgcattatcattttcttcttttgggcaacttgctatcttaagtaaattaactagtcgatcctctgtgaaaggtggcctattttttgcaattttaattttaaattgttgtcttgattggataggaaaaacatggcatacagtctaatatgctcaaaggcaacaaactatagattgaaaatactttgcagtggaaaatcatgttttaaatttataaatatttgcttattaaaaatcaccttccaatgtatatatatatattttaaagcatggtctttgtctattatgaccctccccatgtacacatcattttggtagcaaaatgtttctggtaaatttttatcaatcacagattgatatgtataagttattaaaaacttttgaagggccagttttaaacattagtatcacatacatgatatgtgagataaaagcgtccctgtgttacttcagttcatttttggaaggcagatgttgcaaattggcaacacagtggccatatttccttcctcctccagcttccatacactgttttgcccacagtatttgaaaaaataatatttgcaaacatttaagaattatacataaagataatttgaggattcacttgacaagtcaaatgatggggtgaaacaatacccacatttctggaaggaaactatcagctggaactggcttcccctttagacagatcatgccctaaaaatctgacccggtccccattttcctggtcccaatagacaggtgatgtttatccctgctttatatgataatacaaaatattttgccctaaacaaaatacaccaaagataaattatattgtaattttgaaaaatcacagtttttgtatttgaaaaatacctcacttaaattatttatacaatcctcagaaaagcacaatgagatagaaaccagcccatagtaacttaccaaaaattatagaaagtaccagttcccaaactcaaacttaggactcaggcatcaaattttctatttctcatgcgtttagacttaacagtcattaacactttaacaagaaggatttaaaaggatccttctcatcttgactgctcagtctaaaatagaaggcaaaataagaaaatgcctaccaaagggagtacagtggagagatagtgcctcctttgaagctgattcactaaggaagtcagttgtggccagaaaagagcagtaaaacactggagggagtgagagggcaatgctttgtaaaagaggaaatgaaaaatcatcaaaatattgtctactttactgtctgtcaagagctcaccccaaccttcagatgttcatatcttgtatcatataatcctcctggtcttgctctctccttcctctttttttccatcttccttctttctctatttccttttttaaaatgtttttgtagagacaggttctccctatgcttaggttagtctcgaattaatgggctcaagtgatcctctctccttggcctcctaaagtgctggaattacagccataagggaccatgcctggccatttgtctatttctcttcttctaccctctctctctctctctctttcttcctattttccttccttcctcacagatacatttatcactttctctgtcctgagcactcagtgaactctggaaaatgcataaagtatgagggtatcatcattaagagggcaagtttaaaaccacagaaaaagcatttgtctcatcctgatctcttaatcagaaactaccaggtttgatagctagaagtatatctgactttgcctgaatttatctgattaaggtggcaatatctgtaaataattccaaatctcatctcttctaaaaagcacctaccattgttgcctcaccttgttcctctgttctcttttccatcactttagttatcaaatagaagagaccacatctgacttttccattgtcttccttctcagtcacttgtgcacctgttgtaatctgtctctcttcacttgtactctacatggttttcttaaagtcattagttatcacctaatgacccatttcaaaactctcttctcaatgccatcctactgtgttcctcttgtatccagcactgtgaatgatcccttactgactataattcttccccaataatcattactcccctcttctcaccaactacttcttctcatccctaaagatgtttctcaaagttctttcctgagtcttcctatcatactcctgttctcttgttggtgattccatctatactcaaggtttcaaattcttctaattacaaaaatgacaaccgccaacattgtatgcagccatatgaataaatagttttaaaatagactttgggatcagggatacttaaatttgaatcccagttccaatatgttttggcactacgacctagaatttaacctgagttccagttttctaatcagaaatatgaagataataactgccctgaaatctgttaaggactaaatgaaataatatatgtttaacaattagtaatcacctagtatttgtaatacagagtattattctatttctaaaatgtgcatggtcctttcaataccattttatataatatataaaaggggaagccatgtctagtaaaagcttggaagttgattttgcaagactattcagataaaagcattttttttattattattatactttaagttctagggtacatctgcacaacgtgcaggtttgttacatatgtaaacatgtgccatgttggtgtgctgcacccattaactcgtcatttacattaggtatatctcctaatgctatccctccccactccccccaccccacgacaggccccggtgtgtgatgttccccttcctgtgtcctagtgttctcattgttcaattcccaactatgagtgagaacatgcggtgtttggttttttgtccttgctatagtttgctgagaatgatggtttccagcttcatccatgtccctacaaaggagataaaagcatttctacagtgagttgaagatgcataaagaatatatgttattttataattacctgacttggctaaaagatagaaatttaaaaatctagttaaaatgttgaaaacttagtctgggttccatggctcatgcctgtaatcccagcactttgggaggccgaggtgggcggataatgaggtcaggagatcgagaccatcctggccaacatggtgaaactccgtctctactaaaaatacaaaaattggccaggtgtggtggtgcatgcctgtagtcccagctagtcgggagactgaggcaggagactcgcttgtacccgggaggcggaggttgcagtgagccgagatcgtgccactgcactccagcctggtgacagagtgagactctgtctcaaaaaaaaaaaaaaaaaaaagcgaaaactactaactattgcatggcatccattctcctctttttcttttagtgatagccttgccccttatctagaaactgcatttactaacctcccttgcaattagtcatggccaggtgaaataccagtagtatgtgtttgtgtcaatagaaagtgaaagacaatctgcatctttttgggtattaaccagaaaacactgggtgtgtgcctacttgttctcttttagcccttcccctggactggaatgaggacatgatcatgttctcaggttcaactatgcagtcgtgtacaacacccaaagagatccaaaatccccataagagaaagttcctgggttcttaagtgaccacatggagcacagtctgttttgatcactttgaagctattacatgagatacaaattaacatggattttatttaaactattatattttggagattttaggtttcaccagcttcgctaactaactcattccctgtttgcccatatcaatttaccttaaaagtagaaattagctatcctgttttttaactaaatataaaatgatgaataattaatatatctattatactatctcctttaaatacagttttctctggcaggcccctgatagaagctggaacactatgagagactaaagtagctctggagtttccaaagtgcaggtgtttggttttgacagatgggtaaactagagacaagacaggagatatgctgctcggaaaactaaggaggctgacttgaaggattattgcccaagaagttaatctttccacttcatgtcagcagtagtaccctcaggcagagtaaagaattttctcaagagcagttttgacaagctcaaattttccaagagctgcttagttggtgacgcagagccctgcaccatagaacttggaaaattggactctaatttggagattctgcgagcaagatcaagacttccatcataaaatcagcttaataaggtccttccaggtttttacatttgagcaacattacctcccaaaatgagcctgctaatgtgagatgtctgaagaatttagtcctagacaaataaattaagagatctaataaatgaaatgatttactataattgatctgaatcagtacaacaaactttttttgtaaagtgtcaaatatgtataatgttagactttgaagcccatacagtctctgtcttaactcaaatttgccactggagcacataaacagcaataaggtgattctgatttttaaataagcatggccatgttccaataaaactttattttggacattgagatttgattttcatatattaggttggcacaaaagtaattgtggttttcgccattgaagtaatggcaaaaaccacaactactttgcgccaacctaataattctcacatgtcatgaaatactttttttcttttgtttttttcccccaatcaaataaatgtacaaaccattcttagcttgcagggggtgggccacactaggccaacaggccagatttagctcatggaacatagcttgctgacctctaatgtagatgttaaaaatctagaagacataattgacattgataattgtcttggtctgtttgtgttgttataacagaatacctgaggctgggaagtcaataaggaaaagagttttgcttagctcatgattctgcagactgtacaagaagcatggctgtagtatttacttggtttctggtgagggcttttgtgatgcattaaacatgacagagaaggtcaaaaggtgagtggacatgtgcaaagatgcaaaatccaagggatgcccggctttctaaaaacccactcttgagggaactaattcatttcttcaaaaactaacccagccttgccagagcaagacaccaagccattcatgagaatctggccccatgcaacaaacacctccaactaggcctcatcttccaaaactagtacactggaggtcacatgaggtttggtggtgatataaacccttgatccccctttgctgggaaccatggcaataatttaaggccatgtaagaagcacaatctacttgctgttgcaggataacttttaactagcccgtctgttatggactaaagccctaattctcagtgtagctgtatttggagacggggcctctaaagaaatacagtcatcccttggtatatgcaggcgattggttccaggactgccccctaagtacaccaaagctgtgcatactcaagtccagcagtcagccgtgcagaatccatgtatatgaaaagttggccttctacacgagttttgcatgggagaatactactttattttttttggagatggagtctcattctgtcactcaggctggagtgcagtggtgtgatctcggctcactgcaacctccacctcctgtgttcaagcaattctcctgcctcagcctcccaagtagctgggactacaggcacatcccaccacgcctggctgattttttgtatttttagtagagacggggtttcactgtgttagccaggaaggtctcaatctcctgacttcgtgatcctcccgcctcggccttccaaagtgctgggattacaggctagagccaccatgccagctgagaatactatattttcaattcttgtttggttgaaaaaagtccctttataaatggacccaagcagttcacacctgtgttattgtgttgttcaagggtcaaccgtaattaaggttaaatgagattataagagtgggacctcgatttcataagttagcacacaggctcgcttgctctttctctctgtctctcccccaaccccttctctccctttctccgatcacagaggaaaagcatgggaaaactcagcagctagaaagtagctctccaaaagccagggaaagagccctcagcagaaactaaatttgctggcgccttgatcacgaacctctagcctccagattgtgagaaataagtttctgttgttcaagccacccagcctttaatattttgttaaggcagcccgagcaaactaatacatatctaactactgttaaaattatttaggaattcattataaaggagaggagcctgttctatatttgagaatttgctccagctaagataaaatttctgaccaaggattggaggttgcaactaaaaataacatttaatagcaaagctcttatccaaaaaggttacaacctttttcagctcactgagattgtaatagtctgttctcacattgctataaagaaatatgcaagactgagtaatttataaaggaaaaaggtttaattgacccacagttctgcatggctggaaaggcctcaggaaacttacgatcatggcagaaggtgaagagacgacatgcgagataggtgagagagagaatgcacacataggaggaactgtcaaacacttatgaaaccatcagatcttgcgagaactcactatcatgagaacagcgtgggggaaaccacccccgtaatccaatcacctcccaccaggtcctgcccttgacacatgggtattatggagattacaatttaagatgagatttgggtggggacatgggacctaaccatatcagagattaacttgatattcccacaagtagggcaatacctgctcagataaatttatgtggtccacaaaatatgcatcatacataataggattagaatatctgagaaaatatatcccaatatacacatatttaacataatctcacaggaaatcccgatttctttctattgcatcaaatacaagcaagtacaagccttaactccatattgtataactgtaactcaaacattcacattgtagtttttaagttcacctagttgccacagaaacacttgaaagataacaaaatcctaagctccaacaaccatctgagtggatccccacttggccaaggggacaccagagcaaccttgaaaactgagttcttggctacagtgggatgggaagtcagacacccctccctggctatacaccattagggttacttccctaagtgctaagcagaaaccaccctttcaaaagattccaccactgatatcaaccaaccacctgatgctgcccctcttctactaactgatgagagacctctggccacagagttgtcatggccagtgtatggagaatctgcagtcagggtcttcatgtcctcttcttcactgcttgatgtcagagggctgaaaactccaccctcagattgtgctaatgctgccatttttgtacgtgggatgcaccaggggatgtaaaactcaattgcacatgtgcgtgtttctcctttcataaatactcatgactcttcctgaggcttattgaatatgtatattcagtcaccccactcagcataaattcctgttgctcctcccttgaagaatcttttctggcttctggcttaaggctaccatatgcttcccaggctgtctgaatggccatcctgcaggctgcaaccctttatgagaagtaaagctctccttttcaaatttatgaacctcttctgttgacacacttcaaactcaagaagtctcaaatgaaacaagtttcaaaatctcatcccataattccatgttttctatcttatttaatgggattcacccagaaactaaaaccaaaaatctaagctatagctgtatctcttccttatccctttttaatttgtttatttacttatttgtacacgaataagttctttagtggtgatttttcagattttggtgcacccatcacccaagcagtatacactgtacccaatggttagtcttgtatccgttgcctcccttccacccactcccccgagtgcccaaagtccattgtatcattcttatgcctttgcatccttacagtttagctctcacttatgagtgagaacatatgatgtttggtttttcattcctgagttacttcacttagaataatggtctccagttccatcaaggtttctgcaaatgccattattttgttcctttgaatggctgatacacacacacacacacacacacacacacacacacacacacacacaccaaatttttttatccactcattgattgatgggcgtttgggctggttccatgttttcacaattgtgaactgtgctgctataaacatgcatgtgtaagtatcttttcatataatgacttcttttcctcttggtagatacccaggagtaggattgatgaatcaaatggtaaatctacttttagttctttaaggaatctccacactatttttcatagtggttgtactagtttacgttcccaccaagtgtaaaaatgtgttctttgtatcacatctatgccaaggtctattattttttggttttttgattatggccattcttgcaggagtaagatggtaccatattgtggttttcatttgcatttccctgatcattagtgatgttgagtatttttcatatgttttttggccatttgcacgtttcttggccattcttcttttgagaattgtctattaatgtctttagcccactttttgacttgattgtttgtatttttcttgctaatttgtttgagttgcttgtagattctggatattagtcctttgtcagaagtaaagatttttaagactgtctcccactctgtgggttgtctatttactctgctggttatttcttttgctgtgcagaagctttttagtttaattaagttccaactatttatctttctttttgttgcatttgcttttaggttctttgtcacaaagtctttgcctaaactaatgtctagaaggatttttccaatgttatcttctagaatttttgtggtttcaggttttagatttaagtctttgttccatcttgagttgatttttgtacaaggtgagagatgaggatctagtttcattcttctacatgtggcttgcaaattatgccagcaccatttgttgaataggttgtcctttacccactttatgtttttgtttcttttgtcaaagatcagttggctgtaaatatttggctttatttctgagttctctattttgtttcattggtctatatgcctatttttataccagtaccatactgtttttgtgactatggccttttagtatagtttgaggtcaggtgatgtgttacctccagatttgtccttttagcatagtcttgctttggctatgtgagttcttttttgattacatatgaattttaggatttttttcaagttctgtgaagaatgatggtggtattttgatgggaattgcattgatgggaattgtgttgatggtaatttgatgggaattgcattgaatttgcagattgcttttggcagtatgatcattttcacaatattgattctacccatccatgtatatgggatttgttttcatttgtgtcatctatggtttctttcagcagcattttatagttttccttatagaggtctttcacctccttggttaggtagattcctaagtattttactttttatttttgcagttattgtaaaaggggttaagttattgatttgattctcagcttggtagctctttgtgtataacagtgctactgatttgtgtacattaattttgtatcccaaaactttgctgaatttatttaacagttttagagggtttttggatgactctttagtcatccaaatgtctctagggttttctgggtacacaatcatgtcatcagaaaacagcaacagttggacttcctctttagctatttggatgccctatatttttttctcttgtctgattgctttggctaggatttacatactattgatataggagttaaaaagaaattaggcagatagggatggtaagagagtcctcaataaggttttccttttaatggagagcagcagcccccaaattatctcttttctgacaaagagcagcctgttaaattgaactgcagacatagataagcaagctggaagcttgcatggatgaatgccagcagctgcaccaacagaaaaaggctacctgggggcaaggcatgttcaacatagtggctccatctgcccttttctttgtcgagcacatgtacagtaagaaacagacaacatggcactggccaggtagagaacccatctgcataacaaaagattaggatggggtgaccaggttattcatgcactatgtaaatggcacacacagtcccatcaatctttaggccctatgtaaatcaggcactgcctcctcaagccagtctataaagctccgtgcactttgccgtggactggaagacccatttgggagcccttctttctctgcagaagagagagctattctcttttctctttcttttgcctattaaacctccactctgaaacttactgtgtgcctgcatccttgatttccctggcatgagatgatgaaccatggatatttaccccagacaatgatgctgcttcagtatgttgaataaaagtggtgaaagtaggcatacttgtcttgttccagttctcagggggaatgcttttgatatggtttggctgtatccccacccaaatctcatcctgaattgtagctcccataatgcccacatgttgtgggagggacccagtgggagataattgaatcatagggtgggtctttcctatgctattctcatgatagtgaataagtctaatgagatctgatggttttataaaggggagtttccctgcacaaactctcttttcttgtctaccgccatgtaagatgtgcctttcaccttccaccatgattgtgaggcctcccaagccatgtggaactatgagcccagtaagcctttcttttgtaaattgcccaatctccagtatgtctttatcagcagcatgagaacagactaatacagtaagttggcaccagtaaagtggtatgctgctgaaaagatagccaaaaatgtggaaacaactttggaattgggtaacaggcagaggttggaacagtttggaggattcagaagaagacaggaaaatgtgggaaagtttggaactccctaaagatttgttgaatggctttgaccaaaatgctaataatgatgtggacaatgaaatccagtctgaggtggtctcagatggagatgaggaatttgttgggaactggaacaaaggtgactcttgttatgttttagcaaagagactggcagcattttgcccctgccctagagatttgtggaactatgaacttgagagagattatttagggtatctggcagaaaaaatttctaagtagcaaaacattcaagaggtgacttgggtgctgttaaaggcattcagttttataagggaagcagagcataaaagttcagaaaatttgcagcctgacaatgtgatagcaaagaaagtcccattttctgaaaagaaattcaagacagctgcagaaatttacataatttacctaagtaatgaggagccaaatgttaatccccaagacaatggggaaaatgtctccagggcatgtcagaggtcttcatgacagctgcgaccaacacaggcccagaggcctaggaggaaaaagtggtatcaagggccagacccagggttcccatgctgtgtgcagcctaaggacttggtgccctgtttctcagtggctccagccatggctgaaaggccccaatgtagagcttgggccacggcttcagagggtgcaacccccaagacctggcagcttccacatgatgttgagcctaccagtgcacagaagtcaagatttgaggtttgggaacctccacctagattttaaagtatgtatggaaacacctggatatccagatagaagtttgctgcaggggcaggcactcatggaaaacctatgttggggcagcacaaaagggaaaaggggtgggtgcctccacactgagtcctcattggggcactgcctagtgctactgtaagaagagggccactgtcctctagaccccagaatagtagatccaccaacagcttgcactgtgcacctggaaaagcacagacaatgccaacctgtgaaagcagccaggagggaagctgtaccctgtaaagccacaggtgcagagctgcccaagaccatgggaacccacctcttgcatcagcatgagctggatgtgagacatggattcaaaagagatcattttggagctttaagatttgacttccctgcttgattttggacttgcgttggggcctgtagcccttttgttttggccaatttctcccatttggaacagctgtatttacccaatgcctgtacccccattgtttctaggaagtaactaacttgcttttgattttacaagctcataggcagcagggacttgccttgtctcagatgagactttggtctgtggacttttcagttaatgctgaaatgagttaagactgtgggagactgtggggaaggcatgactggctttgaaatgtaaagacatgagatctgggagggaccagggcagcatgatatggtttggctgtgtccccacctaaatctcatcttgaattttagctcccagaattcccatgtgttatgggagggacccagtgggagataattgaatcatgggggcgggtcttttccatgctattcttgtgatagtgaataagtctgatgagatctgatggttttataaaggggagtttccctgcacaagctctcatttcttgtctgccaccatgtgagatgtgcctttcaccttctgccatgattgtgaggcatccccagccatgcggaactgtgagtccattaaacctctttcttttgtaaattgcccaatctcaggtatgtctctatcagcagcatgagaacagactaatacagctttccacttttccccattcagtatgttagctgtgggtttatcatagatgacttttattacattaaagtatgtcctttctatgcctattttgctgagggttttaattataaagggatgctggattttgtcaaaggctttctctgcattgattgagatgatcatgtgatttttgttttcaattctgtttatggggtgtatcacatttattgacttgcatatgttaaaccatccctgcatccctggtatgaaacctacttgatcatggtgaattgtctttttgatatgctgttggatttggttatctagtattttgttaaggatttctgcatctatgttcatcagggatattggtctgtagttttcttttttgtcatgtcctttcctgtttttggtattagaatgatattggcttcaaagaatgatgtaaggagtgtttcttctttctatatcttttggaatagtgtcaatatgattggtacccattcttctttgaacatctgatagaattccgctgtgaatctgtctggtcctggactttttttgttggtaacgttataattaccatttcaatctcactgcttgttattggtctgttcagagtttctattacttcctggtttaatctaggagagttgtatatttccaggagtttatctaggttttctagtttatttgcataaaggtgttcacagtagccttgaatgatcttttgtatttctgtggtatcagttgtaatgtctcctgttttatttctaattgagcttttttggatcttctctcttcttttcttggttaatcttcctacatggtctgtcaattttatttatcttttccaagaacaggtctttatttcatttatcttttgtattgttttggttgtttgtttcaattgcatttagttctgctttgattttggttatttcttttcttctgctgggtttgggtttagtttgtacttgtttctctagttccttgaggtgtgaccttagattgtctatttgtggtctttctgagtttttgatataggcatttaagactatgaactttcctcttaacactgcttttgttatatccaagaagttttgataggttgtatcactattatcattcagttcaaataatttttaattttcttcttgatttcattgttgacccaatgatcattcaggagcagattatttaatttccatgtattggcatcattttgagtgttcttattggagttgatttccaattttattccactgtgatctgaaagagtacttgatatgattttaattttcttaaatttgttgagactcattttgtggcttatcatatggactatcttggagaatgttccatgtgctgatgaatagaatgtatattctgcagttttggggtagaatgttttacaaatatctgttaagtctatttgttctagggtatactctaagtccattgtttctttgttgactttctgtcttgatgacctgtctagtactgtcagtggagtattgaagtcccctgctattattatgttgccctttttaaactcctatgtgtcaattaaagacaggctttttccatctagtgaatccaccattccccagggccttagagtcctaccttagatgggaaaactagaccctcatagacggccaattgctccttcacatctcagtccagatgcatggggcccagaaaatgtagttcaatgatttgacaagaagagaaaaatgttggtattagggagttctagaaatctttgccttcagattacagaagatagcttttatcttccgactatattttaaaatttaaatggtattaatgatattaatggttactaatgtctttctctgttttttcatgccattctattttatatgtaataaagaacttaatatgctgttacttttcttgcctttctcatctgctgttttcaatgttcagtttattattattgttaatattgttgttatgatataatttttttatgcaactattttctctaaatagcttcagtacttatcagcaattcttaaactttcccaatcttgagttctggatcttgattaatctttctgtcttctgaagaagattattggatagttttatcatgaaacttaaaaagatcaattaattagttttatgttctctaaatgtttggtgatataagaaagtatttctctcatctttgcacattctcttaaatttgcccaaataagaaagtatgtctgttgtttttacacataagtaaccatttaaatgtgtataaaattcttggattaaactatttcccctcaaaacttgttgaaattgttccattgtctttcaacatttgacattccacataagaagtttgaagcttatctgatttttttctcctttataaatgttcctaatttttggtttacctttaaaatgtttcaatattccatgatatgtctatgtttggatatattgtgattattttggagaaaactgtattagtctattcagtttgtagacataagtcattttgggtaaggtttattggggcatttcatatccataattatttattgcatttatttttaaggtaattagactttttctgttctcgatgtctataatttttactttcactgatgtccttgtcattttcctgttaattctttgatattgtgcatttttaactctgctcatttctgctttcaacgtacgttttaattctgccattgctttacatggttccttgctctcctttcttatttaaggcagacccctttacatctctgtctttgtggctgtctttttatgattttacaaacctacttcatagaggcttctttttcataaagtaatgtcccttttttatttttggtacaccatgcaaatattttataaaacctccatcccattgtcatagaagtaatatacacaaaacttctgccttggaaggttctagacaagatttcccttgtcttatgctaggaagaagccttgtaacttatgtttttctatttaaaaaaggagagatacattcagacccagcttttctcaatagacagggagggtgaaatttacttgcctcttcattcagctgtttccatgttaatagccttcctctctcagaggtaaaatcaaggtcatcagcctttaattttgtgctggtctattgaactgaagatgtatcttctgtttcttagatggttcactgacttaggaagagtacatcaaagtttaaagaccttatttgagcaatgaaaaagatgcttctatgcatgtactgctcccagaacttctcatgtgataaccaggaacatgtataaaattgtatgtgtttctacatttttctatgttttggacttccaagtgtaacatccacatgagtggagaaacaagtgttgaagcaaatgttggaaacagggagaataggccagaaatccggtacttgttacccagaagtgctgcctgtttctgttctcaagagcctccatatcatgcagtaagacataaacaatggaacggaatcaccatcttttcctgttgtcctaggttctgttctgtttcagagggactggcatacggtgcatggctaagaaaggacatttaatggggtctcatccagacattgacatgtgatctttgctcatcttgaacttgtgctagtggaaatatatttaatgtatctacataggtatattaattggaacttgatagtgcagataacaggcacatttaataacccaagtgaaattaatttatatacgtaagtgaagtttgaaagcatttcattaatattatatctttagggcttgactttataatcagcctgctcacttaacaaactaaaattcaacataaactacaaatctagtacactttgcattataccatagcagccacaaattaatgagtaataaataatgctgtgagacagtagaaaatgatgctagtaacagaagaaacgtttgcactcactacacccatggctttgctgtacttgacgaatattatcattcaggaaaatgttaagggattttaatagtcagttcctgccgatgatcaataatgacctcattattgcatgtgcttacatttttgtgacatcagaggaaagaaacactgcaaaacccagaattttccaaattaattgctaaaggtcttccaatacaaactcttccaactacactggcacatcatacccttttaactatttctagagctaaagtgaaagcagtagtgtatttaggaaaaacaaaaagaaaaacctagtattcagtttttatgcaaaatcaccaagactttaatgtaaaggggtcctttaaagaaacatactattctcaaagctatattactttatatggccatatgctgggatctcacatataagtgaaattggacttcaatagccataaggagaaatgccactttttcctcccaatccttggactaatgctgtttaactttttttctttttttttttttcctgagacatggtctcattctgttgtccagcctggagtacagtggcacgatctcagctcaccacaacctctgcctcctgagctcaagccatcctactgcctcagcttcctgagtagctgggactacaggtgtgtgccatcacacctggttagtttttgtgtttcatgtagagatggggtattgccacgtttcccaggctggtctcgaactcctgagctcaagtgatctcagcctcataaagtactaggattacaggtgtcagccactgtgcccagcctgagcaatttttgatgcataatttgacatgaaatttcagaaggcttgtaagccaacactccacccccatcctaacaaactaaggtaatcgtttctgcttaaaagtctctgaaaataatactgatgtaagtagagcagcataatacttcctacctaagaaaatatggctgttttcatgttctcttgttaaagaatcattgtgggcagataatgagaagcagagcctaaggaaaagaatggataaattgggaggaagaggagaaaaaataatagactggtctttgaaaggataagggttgaagaattgatgagttatatttgcaagacagttagtgattgattttggtatcttttaaaggcttctctacattatagaaacacattgaactagaagagaaggatgagagccctgataaaaatttaagtattatcctgagccagtccttaaggggagcatgctatgtagccctgctacattgacaatgtatataaaaggatatctttctaagcatccttctaggtatcagttagcgaatgttgttagcaagttaaaaaaatgtctctaggatctgtgtcaggaaatgctcttatttgtattagcctagtcttctctctaagattatgttacttatgagcagaagttgttctatgtactgtatactttcattttcatcttagtttcctttcataagtgttatatcaaagttctgatgattcattgaataattataagtagcaaaattaaaatatttaaaggaaattaaaaagatgagacttttataagactcatattcctacataagactgcaattaattatgagattgggaaaaaacgcaaattattaaaaaataaaaactgaccaggtgcagttgttcatacctctaatcccaacagtctgggaggctgaggtgggtgaatcacttgaggccagaagtttgaggccatcctgggaaacatagcaagaccctgtgtctacaaaacactgataaaaattaactagtgtgatggcctgagcctgtagtcccagctacttggaaggctgaaacaggaggatcgcttgagcccaagacatcaaggctgcagtgagccaagattacactactgcactccagcctgagtgacagagcgagactctgtctcaaaaataaataaataaaataaaaactatcaccaccagcaccaccaaaaaggagatctcataagctttttttaacatttccaaaacaaaggctctctaaacttctttttttctcattctagaaagctaatgatagaattttttttttcccctgaaagcctcagctacattcaccatgtcctgcatttattgttgacagctgttcaagacctacaaggtgaagttgaatattacacacttttttggagttctgctacctcaaacgactctctaaaaatcttgccagatgtaaactctcatgtcattggccacctaaagccaaacacagagtattggatctttatctctgtcttcaatggagtccacagcatcaacagtgcaggacttcatgcaaccacttgcgatgggggtgagtccagattctaaaggatatttgcctcagagatgcgaatgaaattgattgattcttgccggggttgagatcagtcatccctccattataaaatttccggtgtgggagggaagggggtggaggctaaaatgcttaagtgctcactgtcatcagtagcagatcaataagcagtcccattgagacagaagcacaagctctaataatgagatattagcccagtttgttcctgttcttttcagtgtatacttattttagaactgagttcacatcaataaatggtgacatttagaaactttttttttaagatttgccctcagaagcagtacgtttttcaaaacgacagccaaacacagtgagagccctccctgagtcaccagaaatggtaggtggaagttcagccactgagaaaaattgcctgtgactcatttctaagccagttagcaagggggaggaagcaagggaagcaacttgtgaatctgaaatgtgtttggaatggtctttctaatcttttttggctttataaagtctcattataaacattataatatcattacctcccaagcaagtgttccaggtcattagcagagctctttaagtgtggaacccatttccctttgtggtgccaaaggtcggcaccttttgtttataaaatagggtagatcacaaggacaattcttcaactagttaagatgggttcttatgataaaaataggtctttgcatagttatttctgacatgcttgaataattatgcaatttaacgctaagcaagatttttttcttatgttagatttcatcattacctatggtaatcaacattcaaaatcatttacataatgacaatattgcattattgcttcatattgcttgagttacaagctagtaacatcaaatgatttttcacgttccaccagcctcattgtatttgagttttattttttgctcaaggagcaaattttatttccttccctccctcccctgcaccttggaggtatagagtgaaaggatggaaaaaagacaaaaaatagataagtgttagtggtgcagatgggtgaataatttatcatcatatcccactggtcacatagtattgaagattagcactatgctggtggtataaagcattttaccaccaattcttatggtttctaactgagagtataataagccaatttacagaggactacagactgtgataacttcatcagcgaaaagcagataagcgaggaaccctttgctaaacctaaatactaatctgcatttagcttaacatgtgctttttcagagacagctggagtttattcagtttcttcctttaattctagagcctcagggcatgcttcctccagaggttgtcatcatcaacagtacagctgtacgtgtcatctggacatctccttcaaacccaaatggtgttgtcactgagtattctatctatgtaaataataagctctacaagactggaatgaatgtgcctgggtcgtttattctgagagacctgtctcccttcactatctatgacattcaggttagaacattgttttttgatggttaggcttatggatatgttaaataaaacatgccaggctatgtcttcaagtggatatcttctgtcttggttacagattatttctttggtggggaagggaaaagagagaagggaaattgatcagaattaaatctgtgtgctgtaggcaaacatgtgagtctctggagagaagataatgataatatggaaaacgatggtgatgaggatggtgatgaaattctcactggcaaaataaagctaatcatgtattctaaataaatcttgttgagcagcttaccttttcccaggatcttttactgaaatcaaaatcagaatcagtttgtaaatgtggagatgtttttttctcttcccatttctcctatttactaatttaatatctccagagaagttatgaaacttcacttggtgtcaatttcctcttttgtaagcgcaatggactagatgtcttaaaacattctagccacctctagcattctgtgattctgaatgcaacaggaagacatatataaaaaatatagcagacaaaaaatattaaaaggttttatctgaaggtgaaagaaatatatttattcatcactcaaaaaatgttcaatgttctccgcatatgtgagagcaattgtggttaaaattttttgcccttggacttctttgagaatcttatgaagtcagtgtactctgccttagaaaaatatttatgcacttgtatgacaaaatttaacacataatttcagaaagtgcactgatcacttgaagtcaaattcatagacttcttcaggggctactggccttaaaagtagaaaaagtatagggaatactaaggcatataaaacaaggaacttatcttcacggaattggaaatcttgttggagtaccaagccataaaagataacaaggctaaatgtgcaaatgagtgataaaaaaaaatcagagtatttcagaaaccccacatttagagaaagcttgcaatttacaaaattttttaataaactatgctacttctaaaattcataagagcttcgtaagataattttcagaagatattaagcacagaaattttatatgaccacagaaactttttactggttctatccatttaatagtactacctcattcaggtttccatctccttttcctgacatttgaggttaagacatataatcatctggctacaaccaacactttagtctcccctactctgactcatagacctagcttcctaagaaaaccaaataaaaatatctttgaataaagaagaaaggtacattaattatttttctttttttttcatttaaatgtattttattttaagttcctgtatacgtgttcaggacatgtaggtttgttacctaggtaaacgtatgccatggtggtttgctgcacctaacaacccatctaccaggtatttacctgtacatgtattattagctatttattctgatgatctccctcccctgatgcccccccaacaggccccagtgtgtgttgttcccctcgctgtgtccatgtgttctcactgtacagctcctacttataagtgagaacatgtgatgtttgtttttctgttcctgtgttagtttgctgaggataaaatggcttccagctccatctatgtccctgtaaaggacatgatctcattcctttttatggctgcatggtattccatggtgtacatgtaccacattttctttatccagtctataattgatggacgtttgggttgattccatgtcattgctattgttaatagtgctgcaatgaacatatatgtgcttgtatctttataatagaatgatttatatttctttgggtatatacccagtaatgggatggctgggtctaattgtgtttctggtcctaggtctttgaggacccaccacactgtctttcacaatggttgaactaatttacattcccaccaacagtgtaaaagcccttctatttctccacagcttcaccagcatctgttgttacttgacttttcaataatcaccattctgactggcatgaaatggtatctcactgtggttttgatgtgcatttctgtaatgatcagttatgttgagctccaggtgcccaccaccacaccaggttattcttttgtgtatattttcagtagagacagggtttcaccatgttgaccaggctggtatcaaactcctgacctcaggtgatccacctgcctaagcttcccacagtgctgggattacaggtgtgagccactgcacccagccaagtatctactttttgaataatccctttatatgtcccttttacaaagaaataataatttcatttttattcagttttacctctttttaatataaatatagtaagctttatatgtttgttggccgcataaattcttctttggagacgtgtctgttcatgtcctttgcccattttttttgatggggttgttttttcttgcaaatttgtttaagtttcttatagattctagatattaaacctttgtcagatggatagattgcaaaaattttctcccattctgtaggttgcctgttcactctgaggatagtttctgttgctatgcagaagctctttagtttaattagatcccatttgtcaatttttgcttttgttgcaattgtttttgatgtttttgtcatgaaatgtttgcctgtgcctatgtcctgaatggtattgcctgggttttcttctaggatttttatagttttgggttttacatttaagtctttaatccatcttgagttactttttgtataagatgtaaggaagggatccagtttcaattttctgcatatggctagccagtttttccagtaccatttattaaatagggaatcctttccccactgcttgtttttgtcaggtttgtcgaagatcagatagtggtaaatgtgcagtcttatttctgagatctctattccgttccattggtccatgtgtctgtttttgtaccagtaccatgctgttttggttactgtagccttgtagtatagcctaaagtcaggtagtgtgatgcctccacctttgttctttttgcttatgattgtcttggctatacaggctcttttttggttccatatgaactttaaagtagttttttctaattttgtgaagaatgtcattggtagtttaatgggaatatcattgaatctattaattactttgagcaatatggccattttcatgatatttattcttcctatccatgagcatggaatgtttttccatttgtgtcctctctgattttcttaagcagtggtttgttttcattgcacaccatgattcccatagcctacctgagttgtcttagcatggaatatgtggactgatgtttatgttcatgattcttatggtgagtccatgtatgcaggtagaccataggccaaattatgaaatagaaatcatgctccaaataaattagaaatatagctatataaaaaaggctaacacaggaaggtgatggaggatttgccgtattgtcttcttttgaccagtgttcgggaaagctgagttttcaaaggcaccttattcatttgctttaccaagactcgaaacacacaacctagaagtgagaacactgtgtgctgtgcatgcatgtgcagctcagctttctgactctggatcaagagttaacgtttaaaagtgtttaaggcctattctatggaaaaggctttatttataccactactggtttgagtcaggtataaataactcaagccagtaggtataaagcctcctcttctggtagcctgaggagagtggaaacagatgaaaatacaaaagatcaaagtagaatccaataatagaattttgttattagtgcctaagatattcttattactgattactatattttttgtgaagctttttgcagtccaggaatactgtacttgatatagctgttgcatttctggaaatttgaacatcaaatttcagtgattttcattacgatgtcaaaggtgatttagtttcatttaaaataagcatttgattggaatgcctaatactttagaattaaggctctctatgctaaccccatctgtaaaatagctattgattttaaagcacataacacactcaagtatctacttttttttttttttttttttttttttttttttgagacagagtctcactcttctcacccaggttggagtgcattggcacgatctcggctcactgcaacctctgcctcctggaatcaagagattctcgtgcctcagcctcccaagtacctaggattccaggtgcccaccaccacaccaggttattcttttgtgtgtattttcagtagagacagggtttcaccatgttgaccaggctggtatcaaactcctgacctcaggtgatccgcctgcctaagcttcccacagtgctggaattacaggtgtaagccactgcacctagccaagtatctactttttgaataatccctttatatgtcccttttacaaagaaataataatttcatttttattcagttttacctctttttagtataaatacagtaagctttatatttgtgtttcattcacatgttatacaatatcgttttagcactagaaataggtcccaaaatggagactgggaatgttaacattagtaagaataaaaacatattggcacatttctctaacatttgaggttaaaacatatataatcatctggctaccagcagtagtcattggtcattttcctttgaccaatgaatcaaaagaaatgttttctggagaaacatttgaatatacctaagtagtttagagcttaaagttatgtttaacatttagatgagaagccagtagggtacagtggagaacaactcagatatcccaaatcttaccagcttgacaatattccctggcttctctgcaaatttgtttaaatggagttatgaggaatcaatacgattatttgtgcatatatccattataatatttggcacatattagatacataataaattcagttgaattgattctgggttatctcattatgtatcacagaatcaaatttttccaatatgtataaagttcattttcattaattatattacagcattatattttaagttcatctgcctttatttcagatttaattggacatgctcagaatgtaggcccttgatagtgtttaaatatccactattaatacctcaaaagactatatggcatcaataagtaacacaactcatacagcattatgaacatatgcctcaactaacatttaggtaccctatgaataaaatagcatatctagtaaatacaagaatcccatttgcctttcctcaaccaccaaaggaacagagaactgtttcacataaaagctcggaattaatgtttaagattcatcagtacctagcttgccttctctatttatatattagatgcttaaagtaaattagcactgtaaaaagtacagtttctctttggtttatcctttaattgagagcagaatgatatcgctttgcagatgttcccaatcttttgcatattcatttctctctcctccctcttggttaacgtgttccttttgtgtgactaatgcttgatgaaccccatttctaatcttcagttattccaccctcctcggtttttattcagattaggtggcagaattaaagggatgaatgatgattttctgctgtgattaaggtaaaaatacaattgcatctggaacaaatggatataaaatacctcagccatattggaaggcttctctaggcctcatttttcctccattagacattagcatttaggctatttgttttacagtgtcaagacttccagaagataccatcattacactacttagttatagatttagagaacagtgagcagtgataacctgttatgcttgcaaactgtcacttgggcatcttccattccttgactatgctcttcagtagattaatgtatctttctctttgtgaatagttgcaaccagagagtaaacatcatcattcccattactaaatcaattatcttgatcccaattccgtaccttcctctgagctcattcctttggagtcagttaacatcaaaaatgaatattgattaaacctcaagaggctatagagaaatacaagagattcatgtgaaatgagggaaggtgggattcagactattgttagtaagtatttcaaaaatggttgcatttattttttctaaactaatgtttgcaggttgaagtctgcacaatatatgcctgcgtgaaaagcaatggaacccaaattaccactgtggaagacactccaagtgatataccaacacccacaattcgtggcatcacttcaaggtacaaaattttgtgtcagttaaatctaaggaactctgatcagaagaaatgaaaataaaaatcaaaggtatcctctcagccatgacaatctcatttaatgggttattataagtatgtgtgtaaatcaaatttttgatattatttcacagatattaatcttcactggacatccaatggcatttaatctttaatttccctgattgcccagcctcagatttcttatttagtaacctgtaagcaaatacttgaaatacatgtctccttatttgaatgtgtcctttagtgaatccttttgcggagcataatacaagcttaattgtaatgactaccttctaacttaatctttttgaaaaaaaattgatttatatacatcagagtgccctaaagctagaaatctgtaaaattagtagggcagataatgtttagataagcattaccaattttgtcagcttcttggtagaatcactttatttttctttattcttttgttgctgagaaatgaccatagtttgaaagcgagtctctttataattcataattagtaacaacaacaataataataatatttggtattgtttccaaagctgaaaataagatggtaaattgttcatccgtttgtatcaagttgaggctgggaaaagaaatcttagtgctttcacattatactttttgcttaagccaaatgaatcacccttctcttacatgtgcaaacaacacacacacacacacagacacatacacacactgaaataataagtctattattaatgtttcaattctgaaggatttctctatgacatgttgaaatttctggatcttaaatcagttcaaaaaattagtactggttttggcaaccaatggttaaaataattagaaaaattcaactaacctgactgttagctgttcgtggcaataatcatatcttgtctgcttgagtatatcttctatcaaacacatgatagatactgatctaatttttggcatactaattagtttataatccccccagcagatatcccccaacctattcacagtattatctactatgcagggaggaaatagtcatattaaatgggcgttagagacctttattctttagcaaacacatctgtggctataataatatagaaggcaaggtggggcgtggtggctcacgcctgtaatcccagcactttgggaggccgaggcgggcggatcacaagctcaggagatcgagaccatcctggctaacatggtgaaaccctgtctctactaaaaatacaaaaaattagcagggcgtggtggggggcacctgtagtcccagctactcgggaggctgaggcaggagcatggcgtgaacctgggaggcggaacttggagtgagccgagatcacgccactgcactccagcctgggcgacagagtgatactctgtctcaaaaaaaaatatatatatatatatatatatattatatatatatatataatatatattatatatatataatatatattatatatataatatatattatatatatatatataatatatatacacacacacatagaaggcaaaagtaatacaaaagagcataagacatgattctaaatttgcaaagttccagtccactggggaagatactcccctaaataaatgtttatagaacaatgtaaaaaacactataataagaggtttagatgtgcaagaacataaagagaaaaatagcaaactttacccagaattatcagtgaaggcatcatggaagatgtgacctttgacttcagtcttgaaaagctcaaggaagaattatagttaggtgggtggatgttttcaaattcttgtctgctggcatccccatgactcaagcccatgtgaatgacgtaacagaatatgcctcatagtacatatttatttataactaaaaataacgtctaagctttataagaaatggaacaaatgtgactgtgtctctaggttttttttcctttaagaagattattgcacataataacagaggacaaatatttttagttgctattaaaaattgcttgtatccaaatacattaaattgatgacagaaacattaaaaagagtattatacaacaagaacaaggaaagtgagagaggagacaacaacagaaaagagattgcaacacaattttgtaagcaatatttgtcagaaagaagcaaatgatttaatacagtggagaaatttacaaccaaaatattggttgacaaaagacaataatgacaggaaacaaactgttttttccacagagaactggagaggctgagcacttagaagttttaaggatgtaaagaggaggagagagggtagggtttaaagctgaaatcatggggtgagacacaactgttaacaaataagtgtttggaatcccaggtctcttgcatctttgctgtgcatccaggggtctatttctcttcctccacatgacaaagtccaccgaccaggagattagacatttattctctggagaaactgagggctactaggcagaggggagctgagatgagacacagaagtaaaaacagtgataaagtgagactacaacctgaatggtgggctttttggctaagtttcccagttctgccctcaaaagcaagtagacaagtcataaacacctccagataggaaactgaacatagttttctagaaaaaaaagaatgatctcaaaaaaaatacctccagataatagcatatagggatccctaacagtaaaaacaacttgtcctctggtcacccagtagggaagtatgccaatcaacaaggctcacctaactataaagcttttagtcagctttttttttttttttttttttttttggtgcatcactcttaaagataaaaaggggaccaaaataaacaaaagacatgatacaatagattcagagataatgcaggtgaggaaaaaaaattatagcctcagacagataaaagaaaattctctaaccataaaacaaaaccagcatacttaaaaaaataaataaataaccaacgaggagaaaacttcatggaaattaaaagggtgaaaagctgaattgaaacttttgaagaaagttcaagggaatgtctctgaaaatgcaatgaaacacaaagatttaaaagagagagagacaaagaaaaaacaatagagagtatccaggaagtctaatatttgaataataagagcttcaaaagagaatcaaaggaaaagagggagaaaatttaaaaaaaaaaaagacaagaaagtatcccagaaccaatgtactactgtgcagatcaaaagattccctggataccaacaatatgactaaaaagtgattacatataaagggatattatcaggaaattgcagagtaccatgtttaaaaagcacatccaaaaagctgccaggaagaacagacactaccacaatcaggatgtgaagcagcatcatgatgtcggtctccattattgctaacccctcttctacccttcctaaaactaagcaaacactgccatgttttgttatgtataattctgccttttccatattgtcatgtaaatggatcacataatatgtagccattcaaatggcttcttttagttagcataatgcatttaagatttgtccatcttattatatacatactagcagttgtatacatactagtagttgtcagtttttgttgctgagtaagattccattatatgaaagttctacagtttgtgcacagtttggataattttcagttctccgtgaccacgattaaagttgctgtaaaacatctatatacaggtttttgtgtgaagatatattttcatttcatgtgggtaaatacccaggagttggattgctgagtcataaactgccagactgatttacaaagtgactgtaacatctttcattcctactagcattgtatgagagttcaagttgctctacatttttgctagaacatgagatactatgaggtgttttcctcttattttttaaatagtcattttaatagatgtttgtggtgtgttattatggtcttaaattacattttccctaatgactaatgatactgataagctttgcaattgctttttgcatgcactttggcatttgtttactctgggaaatggtatctccaaatcttttgcaaatttcttaattagattctttgttttcttattttttgagttttgaaaattttttaaatatattttggatttgagtttttgtcacatatgtgatttacagatatttcttctctaccttatgatttgttttcaattatcttatttgtgtgtttttaagagaaagagttttaactttccaagagagttagatttgttactttttccttgacagtttgtgcatctggtattttatctaagaactttttgcctgagttaaggtcacagagactttctcttgtctatttcctagaacatttgtatgtttacatgttgaatttatgtctatgattggttttgtgttaatttttgtatacactgaggcatgagtcaaggttaattttttttggcatgtaagtatttaatagtatcaacaaaatttttggaaagattatcttttctttattgaatatttttagatttttgtcaaaaatcaatttaaacacgttttgtaggccatttttggactctcttttatgttcaatttatcaatatgtatatctataccaatatcgcacaatcttgattactacagctctatagtaagctgtcaaatcacattgtatgagtcctccaactttgacctttataaaaatcattttggcctttctcactactttgcctgtccatataaatttcagaaacaggtcattgatatctacaaaacatgtgattttgattagaactgcattgaatttgtggatcaattggtagagaattgacatcttaacaatatcaaatgttctgattcaagaacacactcttgctcatttatttgcatcttctttcctttattttatcagtgttttatataatccagtatgcaaatactgcacatattttattaagtttatacctaattacttatttggggggtgctattattattgtttctttaaaacaaattcaaatccaattgttgctagtgtgtagaaacacaattaattttggaatagtgagcttacatccagcaaacttgctaaactccttgtaagtcttaagagcttttttgtaattccctagtctatatagatcttctacaaagagaaactgtttatttttttcatttccaatcagtatgtcttttatttctttttcctgccttattgcactggatagtttaataacgtgataagagcatatccttgacttgttcccaatctttgaaagaaaactttcagtcttttacccttagatgtgatgttacgtatgaaatttttggccatgccttttatcacgttgaagaacttactttttatttttaatttgctgacaattttcattataaatggacatggaaatttgtcacatgcttttttgacattttaaatttgtactatgatcgattatatttactgattttaaattattgaactagtttgtattcgctggataaccagaacttcgttgtgacatattttcttcttcatatattgggggatgcaatatactattatcttatagaaaatgttcatctgtgttcataaaatatattggactgtgtttgattttcttgtaatacctttgcctggattgggtatcatggtaatttctggtctcatactaacttgggaagcatttccttcttttctattttgtggaagagattgtacaaaagtgttattatttcttaaatcttggtaaaattcaccagtgaaacccatatttgcctggagtttttctttgatggaaggttttttaacttggaattcaattcccttaataatgtatgatatttggcaatttattctccagtgagtttagtcatcttgtgggtgcagaaaataggttaatttaatcaaatttgtcaaatttattagcaggaagttgtttgtagtatgtttgtactacaaacaacaatttgttgcaattgattttattctttcatttctgatattggtagtaagtgcccccgtttttctgttcagcctagagttttatcaattttgtagatcttttcaaagaaccatttttggctttatttattttctatatcatctacattgttttctattttccatttcagtgatttctgctctctattgttttcttccctcttgccttgctattgcttctctagtttcttaaagatgaaaactttcattattgatttgagacctttcttcttttctctcagtcctgcttcggtatgaagctcacaaattttgaaatgttgcattgcacttcatttattcaaaatatattttaatttctcttgagacttctttaacccatggattatttacaagggtattgtttaatttccaagtatttggggatttttcagataagtttctatctgagtttccagtttaattctattatgatctaagaacataattttagaattccaattcttttaaattagttacagttttttcagggcccagaatatgatctatcttagtgaatggatgtgcacttgaggagaaggtacagtctgttgttgtcagatagagtgttttgtaaatgtcaattagatcaagttgagtgataatggtgttcagatcatctatatacttactgattttctgcctgcttgttttatcagttattgtgagaatggtgttgaagtctccaaatgtcattgtggctttatctatttcttcttcagatctattagtctttccttcatgtactttgatgttttattattaagtgcatacatgtttaggattgttaatgtcttgataaactggctcttgtatcattatgtgataagcccttttacttcctgataatttccttgttcttaagtttattttgtctaatattaatatagccactccagctttcaattgcttagtgtaattctgggtgatttttcgattgattccttcacattttgaatattacgttataaaaatctgactcctgttaaaatcctttgaagaaagttagagttcttatttacttttttcagcaggttaccaactggttagcttcagactccaaattctgttttcctttgccagtgactacagtcagttcctattttttcataaagtagcataacaaagctataaactttgctttactactctgtgtctgcacaatggctaatttgggatttggctgtagaattatgtaatagttctgatctcaaaatcttcgctgtgctgcttgcataggctatgcatgtgaggcaaccataaatgtgcagcttggagttgagtcaggacttgcgttcgttcattcataaaattagcttctagctttcttctctctgaaatgtcccccatctttccagctcctttggacttccttccctggatttttggctagaatgatatgatttcttttgaaatgtttgcctcccagcctgcctccaaatttgcataactggagttgttcttaggcaatgaggtaagaggaattcgagaaaaaaaaataacaaggacttcccccacattctttggactatagaggccccatttcctgatttctctggacagaaagatttttccccccgttggggctttagattccaatttggccacagctgccgcagtgcagctccttggctctgatcatcctcggagcagggcccagcagaaagaagacaaaacaaaacaaaaatgggggttttccctatactctctggcttgcaaggcattttgttctagatactctagccggaaaaaatttactttctctaggattttgcttccctagttcacagtttcacactgatactgcccttgggttaaagatgggaagtaaaggagggggaaaaaaaatgggaaactcaccctgtaacattcattcttaaagttttgtctcccctcctgatcagccttattgttagcttttcagagtcctcaggtagttactttatataatttttgcagatactgagttgtaatcagtgggagagataagctgtaatgggcttattccatattggcctgcatgggaagtccccctccaccacagttttctttcttccaatgcctttggcaactttccttttcccccccagtcagaagcctagcaaaaacttgatagaaatcattcataaccaaatattggcatgtaaaatctttcctttcttaaaatgatccatagtagcagagtaacattttccaaaggcaagactctaatgagcaactataggctgccaagccattaatcaaaattataccaacaccaaagcagttagccttgtgtgtgtatggtattgtttgtgtaatttcattatacttctggcaatgtatacttgttagttatgtttctattttggttttaaaaaatctttcatattagcaacatgcaaaatgaaatgtgaaatccttccagaaaaacatcagcagacggggtctacttctctagcatttaaaataatttggtttctaagaagccatacatttcttagattctttgtttatttttggtgaaattcagaagtcagtaaaatttaactcatatatttcaataacatacagatagcataccagcctgtttgattatatgcgtgcagtgtaccaactcatctttgtctttggccttaacttatgccttgtttttgactacatcttcagcagtacaagcccttatgcatgtttttcctcttatatataaaccaaagattccatagcacacaaataatatagaagaatcaaatggacccttctagttttataagctgctgcttcagagacaagccctgtttctacattgcattttccatacttctcatattatcatcagctccttctatatcccaaaagaatactaactactgatcgataacccggacatgtctggccatggcctacatgtgccctgggtagttcatttatttgtcttggtggatttgctagagtggaatttaatcaatagctaattcattaattctggtcctcgagaatgtagagactgacctggatgaagataacgggctgggtctggctttgatagaaatatgacaaacactgcagctgacagcttcactaggtactgtgctatgaagtttagttatttattccccataaatggagacactaagaaaataacacaaacaagaaagatgttttattacattactgttagtattccaaaatgcatcatttccaggcatgaggctcaagggaaagtagagaaagaactcagatcatgtcttttaatgtctttaattggaaccatggcagttttttcacatccaaatcagtttggggatgtgttattgataaggagtgtgaggtataaagtcttcgtagcactcacaaataattgttttaagatttgcttctagatgctgaatgagatcaatgatattcttatacacaaactttgcagaaatctttctgataacagcataggttagatgtctctaaatgaatgctaaaccactatcgttattaatgaatatctatatatttttttcttttttgttgttgttgttgagacaggatctcgttctgtcacccaagctggagtgcagctcactgcagccttgaccttccaggctcaagcaatacttcctcagcctcctgagtagctgggacaataggcatatgccaccacacccagctaatacatttttaaaattattttgtagagttggggtctcactgtgtcgcccaggctggtctttcgaactcctgggctcaagtcatcctcccgccttggcctcctaaattgctggtattacagatgtgacccacacagcacccggcatccccctatatttttaaattacttaatgtggggttaagtatggttcaagaggtcagagcttgtggagaaagaggattctccttttttcctcaccaaattttatgagacatgctatgatatactttttatgctatgacattagatatcagggaatctcttctatccttgattttttctgcctaacttttctcagtgaatgatagcttcaactgaagtaatgattttacagttttgtaaaattaaaagaaaaaattaatattttacatttaatttaattatttaacattacaagaaaaaattaaggccacatttctgtttgtttgctttaatagggagagtgttgggctgaaggatacagaatgtcaaatcacttgttttcacctgtataccaaacttgcttaccaatatgggcaattgtagactatttttaatatggactaaaactgtctgcttaaacctttaaaggatatgggtagaaccttgaaagagagaatttggactacactaagtgcaattcgtacagatccaatcaatagccttatggtcaccatggcttttaggaaatattactcatttgatggccatgagttctgattatcacattctgtttaaggagaccttaatagaatagtgtcagaatatagaatgtaaacagaaagacagaatatatagaaaagagaatattgggcttattattatggctctgctatcactattttcatttccttacctccctcttcttcccaaactcctcctaacttctttacctcttgtagctcccatagaaacagctcggtcgctgaagtagcctttgagtgcctttcagcaaaatccagttcttcctcctaattcactttagccctcaactgccactttgtccctggttctctaaacattcattgttttgttttgtttttattggttccattaaaaacccacttatgcattctgggtgtcctcaggaaaaagactccctaccttgctcaggtagttcagtcttgcaattttaagccatactgatgtctcaaagatctctggccctgttttcttcctaaactctaatcccacatacccacttgcctattgattttatgtcatgatattcacccatcacttccataaccatgagattcacaagttaattcttatctaactcatcatcttttccaacactcacttctgcaaatgtaccaccatcctgcatattatcgaggacatatatctttgaagtatttttaatcccctaagtttattaaacactgattttagtacattttctgttggagcatcttctcatatatgttactcttctccatttccaccactaccaccctggttcatgttttcatcgtttaagtttatataaccattttatggagctgtcttaatccaattagatacaaagagaaaaaaaaatcctttacttttcacctgctacttactgccttaaacacactgttttggctatccttccctcaattctcaaataccccacaggaacatcttatgggtttccaattatttttagttatgagtctcactttgataattaagattcatgatcaagtattaaaaagtccattccatcaccatcaaaatattagcctcgcatctagttcaaagattctatcatttctaaagctcaggcctaattgtagcttgctcttttcttccctcttactctttctttcctattccattttatccaaatatgttccctttcaattttattacttcactgccatcactgtttgacaatcacagctctccattggcaagtgatgctttcttgggcaattgtatgtttttcttgagaggtcctcatgagaatctttgaatagccaaattccctcacacgagtgttgccctttatagctgatcacttgtggtgccaaaagagcagaacattccaaagactcttcctgctggagtctcctcatgccagaaggccactgtcctgggccatgtaccttcaagttagctcaaacctagccatcttgcaaggcatccacttggctcttgagaaactcatccatctatgccatgctatagatcaatattgtggtattctaggcttaacctttcattgcagaactgctctggccaatctctggccactagaattctctaactgagaagtaagctttatttcctatgctcatacagactgccaaatttaagagttccctgtcaagctgtcccaagatctcttcaccacattttcctccaaggacaaaaggagggaaatgtgtgttcctttttattaaaagaacatgggttttgcattttgactttttacctactacaatttataataaacatctcagtaggataattaaatattcagtgacttgacttgaaagcaaagaattaaatttgtcatattacatttatttcatctttgttaaaagtgttctgatcatttttgataaccatgatctggaataatattgaagaacttgagtgttacataaatgattgacaaaaatgaccaaatcgattagaaaaaaagcctgtgtaaacataaccagataatctagagctatttaatccataacaatttaggttaatatcttagagtgtatgaagatttcttttctctggtcaaacaaaaatgttttgaaaaaattggggaaaaatattagaatgaaatgttaaagaatagtaatgtgaacctgtcttcataaaaatttgatctgacttgtatcattttgatattcacctgtgtaaaggtaagtgatatcaaattattttccctacactcctttgtatcttcaatggtattttgtacttcaagggacaactggaagtgatgagatctggggagggtgaaatgcatctgtaatcctaactagttgggaggctgagtcagaattgcttgaggccaggatttgagtccagcctgagcaacatagcaagatcccatctctaaaaataaataaagaagaaagtgatgacaactgtgggggtggcacaatagtatgtagtagtaacagtaataaaatagtaattctgctgacaatatgacataattaaaaagaaataactacaactagaatgtctgaacacttgatgaattcatgtaccaaaatatgtgtaaagaacttccagttccaaaatgatgacatagaagcaagctggcttcactcctctccacagaaaacagaaacaaatgtacagaactgagattatcacagcaatatcccagaactcaaatatgaggacaagacagttcccaaagtcacagagaagtgaaaatctccgagcagatggtaagaaaattggactttcatatccacaatgcccatctccccaatatattcagcaccacgcttgtggaaaatattttcctgacccttgatttctgcactggaaaagtgcgattgaagtggacagtttcccgaccgtcttaggttacctggcaggagacctttacctgcctcaacccacaggaagcatcaggagtgcccgaagggctctatctctgtgaggacatccagagacaatgtggggagatgggactaccatcaccagccctggaaattctgctctgtaactcagtaaaaggagatgccaaatcagagtggctgttcagcagcaccacactgtagtagttttgctccacaggtttcctgggcaccaatcctcagccagcctcctcacactaccaggatatcccctttggaacctcccctatttgggaaaggtggtattctgatagtttactggagacaaggcaaacctggacctgaggcaccatctagtgccaaaaaggaggcagtgacccagtgaattaaaaaaaatgaaagaaaatgaacagaaaaattacaaagaatctctatgcaaacatacctaagaaaaaccaaagcaagccagagaagactgcaataaataactaatccttcaatgcaaagacatagacatatatccataagaaatggagagaagagtaatatatgagaggatgctccaaaagaaaatatactaaagttgctgtttaataaattcagggaattaaaaataattcaaagatacatatccttgataatatgcaggacggtggtgtgtttgcagacatacaacttctttaaacagggaagtaggatcttctcaagctgacaaaagcaaggaaacagtgagtgaccctaacaagatggtgataggtgaactctatgaccaagaattcaaacagttttaaggaaactcatgatcaccaagatagtacataagataaattcagacatttctcaacagatttaacaaagagattaaaatggttcaagaaattaaaaaagaaatcttggatctgagaaatacatctgctgaagtgaaaaattcattagaggctctcaatagcaaactagatcagaggaaagcatcaacaaacttgagacaggctatttgaaaatacagagaggtggggataaaagaatgaaaacaagtgaagatcacctacaaggtatatagaaaactacctgaaaagacaaaatctaggaattattggtgttcaagaggaaggtaaacaagagcaagaggtagaaagctttttaaaagaaagattaacagaaaactttgtaaaatgtaagaaacagagaaatatccagatatagaaaggtcagagaagaccagatttgattaaaataagattattccaaggcatataacaatcaaattcttaaaggtcagtgacaaagagaggatcctaaaagcagcaagagaaaagaagcaaataacatatttaaaagcttcagtttgtttggcaacagtctactcaacagaaaccatacaagctaggaggaagtgggatgacattttcaaagtgctgaaataaaaaaacaaatgccatataaaagtactgcatacaataaagctatccttcaaatatgaaagagaaatgaagtccttcccagataaaaagctgaagtaatttaccactatgagacccatcttataagaaatactaaagagagttcttcaaactgcaagacataaaaaactaatgcacagaaagaaaacatttgaaagtaaacccactgataaattaagtacacagacaaacccagaatactctaatactgtaattgcagcatgcaatccactcatcacttcagtatgaagcccaaaagacaaatttatcaaaaacaatagtaggtacagcaacgtgttaagagatagacaacataaaaatatacaaattgagacgacataaagtcaaaatatggagaaatacagttaaattttagagttttttcattgtttctttgtttttggcaaccaagtacaataaccatatgatcatttcaatagatgctgaaaaagcatttgataaaattcaatatggctttattataaagtccctcaagaaactggatatagaaggtgcatacatcaaaataaaagccatgtatgacaaacctatggctaacattgtactgaactgggaaaaaatgaaagtctttcctggaagaactggaacaagacaaggatacccacttacacttttattcaacacaatactggaaatcctggtgaggcaatttgtcaagagaagaaataaagggcatccaaatcggaaagggataagtcaaattagccttgttaacagatgacatgctcttataattagaaaacctaaagactccaccaaaaaacctgttagaactgatgaacaaatttagtaaagttgcagaatacaaactcaatgtacagaaatcaatagcagttatatacaccaacagcaagcaatctgaaaagaaatcaagaaagtggtcccattaacaatagctacaaagaatataaaatacctaggaatcaatttaactaaaggagtaaaatatctatacaagtaaaactataaaatgctgatgaaagaaattgagtaagatacaaataaatggaaagatattccatgctcttggattagaagaattaatattattaaaatgacaattttacccaaagtaatttacagattcaatgtaatacatatcaaaagaccaattacattcttcacagaaatagaaaagtatttctaaaatttatatggaaccacaaaacacccagaatagctgaagcaatctgagtaaaaaaaagacaaagctggaggcattacactaccttacttcaaaatatagcacaaacctaaagaaaccaaatcaacatggtattggcataaaaacaaacacataaaccaatggaatagaatagagaacccagatataaatccatgcatttacagacaactcatttttaacaaaggaaccaagaacttgcaatgaggaaacagtctttttaataaatggcactgggaaaactagatatccatatgcagaagaatgatagaagagacagaagagatagacccctatctcttaccgcattcaagaatcaactcaaaatggattaaatacttaagtctgagacctgaaactgtaaaaccaatagaagaaagcattggggagatgctcccagacatgatctaggcaaaggcatttgtgtaagatctcaaaaacactggcaagagaagcaaaaacagaaaaatgggattacatcaggctaaaaagcttctgcacaacaaaggaaacaatcaacaaagtgaatagacatgccatagaatgggagaaaatacttgcaaactgtctatctgacaatgaattaataactgggatatataaatagcttaaacaactcaaaagcaaaaaacaaaaacaaaacatctgattaaaaatgggaaaatgatctgaataggcatttatattgcctattgcctattcagaagacatacaaatggccaacaggtatatgaaaaaatgttcatcatcactaaagagatgagaattgcaactcaaaaccataatgaaatattatgtcacccagataaaatggctttgataaaataaaaaagcaggaaataatggatgctggtgaagatgtggagaaaggggaactctatttacactgttggtgggaatgtaaatttgtacagccactatagaatattgtatgggggttcctcatgaaactaaaaattgaactactgtataatgtagcaattcactactgggtgtatatccaaaagaaaggaaaacaatatattgaaaagacacctgtactcccatgtttattgcagtgctgttcacagtagccaaaatatgaaatcaacctaagtgcccatcatgaatgaatggataaagaaaatgtggtacatatacacaatggactcttattcagccataaaaaagacttaactcctattatttacagcaacatggatggaactggaggtcattatgttaagtaaaataagtcaggcatagaaagacaaacattgcatgttctctttcatatgtgggagataaaaaagtgaacctcatgaaggtagagagtagattggtgattaccagaggcctgagagggtcatggggagagggagaggaagaatagattgattaatggatataaatttacagtttcaatgaagagataagacctagtatttgatagatcagtaaggtgatttatagtttacaatatcttttacatatttcacaataggtagaagggaataatttaaatgttgttagcataaagaaaagacaactatttaaggtgatggatatgccagttacattgatttgctctttacaaattatatgaatgtattaaattctcacatggaccctgaaatatgtacatctattatgtattgattaaaatatatttttttaaactccaggcttccccaagattgtaatccacctgtaatttaactgactgctagtaaagcctgttactttcagaggaaaacaattcaacctagagactttgcaaagtataatccacaatgttgtgtgtatgtgggctgtgtgtgtgtgtgaaggaatgagaaaatgtaacccaaacatttgagagagaaaaaaatgtgtgtagacatggtgacttttatcagaagttgtattaaggtatcttaaatttcagttcctattactttaaaatctaaaaaaaactataacagttatttcatgaacaaatctaccaaaaaaaattcattcaaatatttgcaatctgtttatgtttatgcatgagtgcccaaaagtatcttcagctctttttctccaatatttaacatttattcctgggattgaagaatgttccttctattttactcttaaacatcaaagcaatgaaactattaatcccgctaataatgatgcatatttctcaaagatgcctttcattttcagatcagcaaccaaaggagtttcaattgtctctccagttggctctaatgagagatgtacagatgttaaacccaatactcttcttaatcattttccttcgtgtacttgattaaatcctcaaaagcaaactgttcatgttcttgccgaaaatataggcggtctcacttaacagttatgttgcacaagaaagggaagttataatggcatggaacgtgctctacgtggtattttctagactttactagttcacgagcttttgtggataagtcaaactcttgaatgtcacttaaatgtaatcttttctgtagttgattatgcagagaatacaaaaggtatctgcagaatgtggaattaattttgaaagtttgataaaaacttcagaataatagctgtggctgtacaagtcatctatgaaactgttctctcataggtgacattaatttcctatctacagagttttattactgaatgtgttatgtttgtacccccacaaaactgaaataatagttttctttttttagcagtctatgaaaatgttgaggtttatcttgactgccgctttttaacataaatatttgggcttcattgaattcctaatatgtgatgtcacttggaattctgatagggtccagtaatttggcctgcaaagacatattttaccttaaaatgaaagggatagttgaaatgttattttacacgatagcaaaaaagcatccaacataagttgtgagatttttattgcttaacttttgaaatagaaggacaaggttcttatgtgcttgctttattccaaagtatatatgggaatgctaatgctttatatgtaaaatgtacgctacacatatttgtgattagttaatttttatggctagaaattctagaatcataaaaaagaactaatcttgaatgtcagagcttcacctatttttttaaaaacaatgagaacaaaaaaatcattataatttttatatttaccttgtgtttcacaaaaaggaggttttctttgctgtgctacactgcaagaatatgtcatgttcaaatctctggggctttattaaaaactttaactactgtcttcttatagagattattaagcaaatactaaagatagcatagatgtgtggtctaggcagtatttttctggcaagtagacctaagtgcagaatttaagttctgtaacattaacctgagactaaatcattttattcagggttgtctcctctgtgaacagctttatgttatgacctcatttgctacagcaaatgaaatattaatagatcattgaaaatgcagtaaagttttgatcagatgttataccttcattgtataccaaaccctgcctctcataaaaactttctacttgggtttaaattgaaattatcactcaattttttaaaatcaaacattttctttaagaacatgacaatgtaaacatatttcttacgggaatctttaagttctatatttttcaccaaaaatcatttcagaccatgctagttaaagagttattgaaaaaaaaaagaatctatttagatgagtcaaaaaattaagcaaagtatgttttaaataagttagtgactataaaatttctcaatttgggcatttattttgactgcaagtaacaaaacacctgacaaaagagacttaagtaaatagctctagatatatagttgactcttgaacaatgcaagggttaggactgctgatccccacccagtcgaaaatctgcatataacttttgactgtcccaaaatttaactactaatagcctactgttgaccagaagccttaatgataacataaaaaactgattaaaacatagtttgcatatatatttatactatattcttaccataagtaagctaaagaaaagaaaatctcattaagaaaatcataaggaagagaaaatatatttactattcattaagtggaagtggatcatcataaaagtattcatcctcattatcattatattgagtaagctaagtaggagaagaaagaggaaaggttggccttgctgtctcataagtggcagaggtggaagaaaatctacatgtaagtggatctgcacagttcaaatttattttgttcaagagtccgctgtggatagttgttggcattggtgaaccaatgccaaatataatggcggcatctttgtgattgttttggccttttcaaataactgaaagatgattgctgaagttgtagacatcatgtttagcggaaagaaagagaaaaggagaaggtggcagctctttcaagaaagctaaaatttcctaggaacctccataggagtcccatcatggtgttcccgtggcatctctgagcagttatgtttcatatcacaactcctaggtaaagtaaggcaaaggagaagcaggttagaagtaggcattaagttgccacatgttctaattgtcaccttgtttaccaagtcatgtatgtcttatctttgcttaccaaacaaaatgctctgattttcttgattagccatagtgacacttgcttcttgtctttgaaactgaaagtaataaaccacctcacgccatgtgttattcttccaaaagctaacataattttgattgatttgaaaatatatgatttcatatataaacatatataattatatatatatattagtatctattgctgccactttttacttaagactgatagcatcaatgttaaatagtgtcttttcagaagtattgattattctctctgttgcagatctcttcaaattgattgggtgtctccacggaagccaaatggcatcattcttggatatgatctcctatggaaaacatggtatccatgcgctaaaactcaaaagttagtgcaggatcagagtgatgagctctgcaaggcagtgaggtgtcaaaaacctgaatctatctgtggacacatttgctattcttctgaagctaaggtaagtcttttctaactaatcagtgaaccatgtttttctcactcaagactccaagtgaaattattagcttctcacaccatgatgtattatgatcaatatttccactactctatgaagaagactccacggaaaagaaaggatgcttacaaaaatcactatcaccctcatgagcactttagccttcccattttttattatcttcacaagaaatataaacttattagaatagggtacatcccaaattttatttgattgagtgacttaaaattttctttacaacagatcttttcagctacaaataggtgtttgtttatatggcactgatgagtaactgtgaggaggacattttatgatttgtcagaaatattttagcattatagtcatttgtagattaatgttcatattagatgcggtttagaaatcagatcaataatacagccagacagaggagtttgtaaatgacttttattgacaaacaacacaaaatccttagtttgaaggtagaattttatataatgaaataatgttcctatttggcaacaacagcatcacacattcaatggctaaagctactactaaatttataagatttactgcaaaagaacaccataattaagaaagtgagttactgaagcaatatggatcaaaatacaaattattatggctgacacaaatttagcaggagttatcatctaagaaatgcataaagccagcagttactaactgtgcattttttgatacttagactctaaaattatcattatgcctacatttgacatcattttatgccattaagtatgcacatatttaaatacacacatctgatgaacatatttgtataaaattaaatttgggatttctgagaagaaaaatactaaaataaatttgcccattaaacatatcctccacttaagaaaaacttgggaaaatgttggcaaaatacggaattcacttctcaatttttttctttgcttctattattttaatatttattatctgttacgaagtggacaaagagagaatagttgtataggcatacgaataaatgatttaaagtttgtggagtgcagaaaacaatgtgttccatcaaagtaaaaactgattctggccagaaactgtcatagtagtttaggtgtgtataatggatttgataagtttcaaccctataactttagtggcaaaatcaaagctaagtagagtaaaactagtaaagataatgtttccatttaagtttattctaaaagatcaaaaggtggatgttcttaaaatgttcatattaaattagaatatacctgagatagggtgaagaaaaagtaatgggatgaagaaaaatattaataaagtattaacagaataatatttacctatgtttaggctaaattatttataaaattactcctacctttctttatgctgtgatttcagaaaccgctttttgtaacttttaaaaatttactgaagctttgtaccaaataagtgactggttggtgtaacattcctaaattcagtgaatgacaaagaaccggttagtttaattttaaatcaatttaaaaatgatttagacaaatctactctacaaaaaaaaaaaaatcatacgggtcaccttttatagaaaataaatgtaaattgatgaatagggaagcaaaagttaggctttagaaaacaggcgtgtgcaaatctcaccacatagtcttgaaaagaaacatcacatttggttattcttataatgcaaatgtcataccttattacactaaaacgagacacactatttaatgatgccttaaacaaagtcttatttttattgttgagcttaaagaggcaacacaggtattgcggtaaaagagaataaaggatgtcagttaaatttcaaaaaaaaaattgtaaagttcagtttgggactaggtactaatacacatttcctagcatgaaagattggagagaagtagaaaagagacttgtattgcgggtttaaaagctttttggctaaatcactgtaaacatcaatgtttcccaaaatacttaaacaagctttaccataagattacagccatggttcacaaatcccagtgaacgtaagacctgggggaattgttaaaacctaggatttcatagctctagtcccagagattctgattcagtaggtttagatttggctgtgaaaatttgcatttctaaacatgttcccaggtgtcttagttcgttttcacagtgctataaagaattacctgagactgggtaatttatgaagaaaagaggtttgactcacagttctgcagacttaacaggaagcatgactgggaggcctcaggaaacttacaatcatggcggaaggtgaaggggaagcaaggaccttcttcatgtgatggcaggagggagagagagcgaaggggagagctgccacactcttttaaaccatcaaatctcgtgagaactcactcgcctttagacctacaataaaagtctctttcctacttctctccaatctttcatgctagaaaatatatattcatacctagccccaaatgaaatttacaattttttaaatttaattaacttcttctgttgtctttcactgcaatacctgtgttgcctctttaatcccaacaataagactttgtttaaggcattattaaaattttatataataaaaaatgtatatatttaaatatatctatttttattataaaattttatataataaaagatctatatcttatgtatatatacatatgtgtatgtgtaagatataagatatacatcttatatcttttattatataaaattaaaattttatataataaaataaaagatataaaattaaaattttatataattaaatacatattatattatatagtattataatagagcacaaagcatggttgaagacttcaaaaaagctgcattctatcaaataacatttataaaattcgaatgatcctggaaaatacatttttaaaccaacgaaatatgagtaatatggtctcagatcttctatgccttacaagaaaataattatattacatgagatacagtggtataacactcttaactaaactgatatttctttaaaactgttttcaaactttcaggtttgttgtaacggagtgctctataaccccaagcctggacatcgctgttgtgaagaaaagtatatcccgtttgttctgaattctactggagtttgttgtggtggccgaatacaggaggcacaaccaaatcatcagtgctgctctgggtattacgctagaattctaccaggtgagggttatttccaggtgtactcaaaaactatgggaacctgaaaacataaacacgtggttcatgtcagtgaactatttcaaacacctccctctcaacaaaaattgaaccataaacacatagccaatggcctgctctaaatattgtttcttccttctgctttgttaaaatataagcaaggctaaatattagaaaacgagagaacagaaggaatttacaatatctactacagaaagaaataaatctggagatctggctaactccttttatcttgtggctttttttattaacatgactatatattttcactattaaatatgtgaattgctgactgttccaccccatgaagctgttccccacttcctccatttctaatctgaactacacatgcattgttcttggatagatcgcaactgcaaatttcatttgtctgagaattctaggccactggcaatattctctcatcataagtcaggcaagggaaggaagaatgctgcaaagggtagcaaactggattttttccttcatccctttttagtattagccaacttagctagccattttgctccaaatttcaactacataaaacaatgcctagtgaatataattgggaatgatgctaataataactgccatttttaaagtaccaagtctctcgcaggctctgtattgaagactttacatgggataccttatagaatcttcacaactccaggaaatttgtattatacaaggcagtttacaagtaaggaaactgttttagagaggatcaataacatatccagattcacagatgtgcatagaagtgaaagaactaaaatgtgaatataagtatgtctctcctaaatctatgctcttttgtgtactttactgcctctttaaccaaaaagcatcaacctcttttgacaatttttttaaaaggactatttaagacttctaaacttcttcattactaccactgtcagttacaatttatcctgcaaaagtaattgagaatacaaaagtaattgagaatacaaacttttttctactacttaagtttgatactgatatcttctttaaagagcaggaaatggatataggagaaagacaagaaagccaagttttttggaggccataggaaagctgaatactttgagatatctagtttagggtgaaatttatgcccaacgtctggttcctgtaaattatgttcagtataactatatccatccaaggcatgtgaaatgagacactgtctaacccagtgtctgttttgcaaaatactggagcaaatatagaaggcgtgcaatcacctgatgggttcatcttgcccattgcacagatagagccaatttaccaaaacagtggtattgcaacagagaaagagcttaataaatgcagagccagctaagcagaacaggaggttttactcaaaacagtctcccagaaaattcaaaacctagggtctgtctgggcacggtggctcatgcctgtaatcccagcactttgggaggctgaggcgggtggatcacctgaagtcgggagatcaagaccagcctggccaacatggctaaaccccatctcttgtaaaaaatacaaaaaattaactgggcgtgtggcaggctcctgtaatcccagcttctcgggaggctgaagcaggagaattgcttgaatctgggaggcagaggttgcggtgagccgagatggtgccactgcactccaacctgggcaacagagtaagactctgtctcaaaaaaaaaaaaaaaaaaaaaccctaggggtttttttggttggttttttgtttgtttttgttttttgtttgtttttttatttgtttgtttgttttgagatggagttttgctcttgttgcccaggctggagtgcaatggcgtgatctccggctcactgcaacctccacctcccaggttcaagcgattctcctgcctcagcctcccaagtagctggaattacaggcatgtgccaccacacccggctaattttgtattttcagtagagacaggctttctccatgttggtcagggtggtctcgaactcccaacctcaaatgtctgcccaccttggcctcccaaagtgctgggattacaggtgtgagacaccacacctggcccagcctagggttttttttaggatagtgcagtaggcatagggctagggaatgaggaatgcttattggttggggataaaattatagggagtcagagctgtcttcttgtccttagtcagttcctggatggggactataggatcagatgagccagtttactggtctgggtgatactagctggtccctcagaataaagagtgtgaaaaatagctggtccctcagaataaagagtgtgaaaaatacgttgaacaccaatcttaggttttacaatagtgatgttatctatggaagcagttgggaaggttaggaatcatgtggcctctggtgccatgaacacctaagccgtagttccttgtggctaatttgttaattttataaaggtgctctgccccccaagcaaggagcaagtttgtttcaggaaaggactatcatcagtgtttcgaagttaaactaaacacctctcatagttatcttggcctatgcccaggaatggacagggtagcttgtaggctagaagcaagatggaattggttaggtcacatttctttcactgtcataattttccagtgtcaggattttcttactgtcataatttttgcaaaggtggtttcaggtgtcctgattaaatactgctcaagttttctcaaggcagagaaccttcactcattatttttccttataattaatagaaaaaaaaagtttgtatagcagtgctgttatttcttattctctatcaaaaatatttcaaaattgaataagttctagtaaaccagattttccacttaagaaaaagtaaaaatatatatggaaataaggattttgtagaaaactgttaaacttcttcatactacagctcacgatgtcaacaatggatcaaatactgttaaatgctttactttctcgaagtaacttaaatttggggagttttcatgtatgattcatatctgcccttgattacaaatcattgctataaaattataattacagtgatcagatggacgttttgtgttgttcaattcctaccattcttcacaccagtagaccaagttgatcatggaactaagtaatagtgttttcatttccacatcacattaaaatttttatgttatgatttgcaacaaactattcaaactctacaaaatatcctctgtcccttaaaactaatgaaaaattcttagttacatcttcactgctgctaactcaggagactggcctgtgactttctcaatgctaacataagtagtcagattttgaaccgacagcacaatctacttttgttaggtttcaaaataaaatttaacatttttcttaaaaatgaaataactcatggaagctcagaagttgtcattgatattatataagcctttaataattaatttttagaccaaggatttaaaaaatatgtattgtctgtatgtataaatacatgtttctgcacacctaaagcattttaatatctaccaaaccattgagcatgccccaaattttgattcttttttaaatagttcatttttcatagcattagaatgcataccctggtgtcaagaaaaaaggaaaaaagcaatctcatgaaataatcaaagagtgttttgctccaatcattaatcccactgtacctaaatgaagagattattttgtgacctctgtcctcagccccgtggtctttgttagctagtttaacactggttacactgagggggaaaaaagcgcaatggtcccaaatcctgttgcatctaaatgtgatttaaatctggtcactagtctgccagttcaaggccaagatgggtataggcattttgatatttatggattagcctgaaatattggtaaatacgtactttattttttttctcatgactttcttccataacaccccataacaaacagcagaagaggaaagaatgctcatttctctcccttttttaataaatatgctaataaccccaagtaaatgttaatgtgggtcattctttgataagaataacaattaactgttagactgcatggtagtttttagagagaaaacattttcaagcctggcctgaaatagattcattttgagaggttaatgagaaggtgactgatccttgtatcttatgtctaatagcccctttttgaggaaaaaaaaatagttttattttttattgatataatccacatctttttttttttgaagacttttcttctgtcagtaactaaataagattctgagggattcagaaagacatagctaaaatatctaaaccaattaacatttattatgctcaaaagaggctttaaaaaaaagtattggctttcgccatgtagatgtgtatactatgtttcctctaagctcaccattgtcctgagtggtgtttaattaactgttgttgccctgtaccatgggatacattatcttaaagtttaccatagagggacattatgttctttgactgtgaagacaaaaaatatggcaactacatttcagacgaaatagaattattttacccaggggaagataacaaatacagtaactttactgtttacaataagctcgttgctccttcattggtctctggtagcatcatcatggaaacttttactaagttccctttttcttagagataccatattataggatcctttcaaagataattgactaagccaactgtctcctgaattctagaaattcatattttgagaaaatcctgagtatgtcttgatccggtcctggatatttaccctagagaaaagcaaatttatgtttacacaaaaacctgtacatgagggtttacagcagctgtaatcattactgccaaaacctggaaacaattcaaatgtccctaagtgagtaaatggacaaatgtggaacaaaggaatactatgtagcaataaaaaagaacaaagtattgataagtgccaagaagatatcaagcccagtgaaagaagccagtctcaaaaagctaccaactgtgagactgcatttacatgacatactatacaagacaaaccatagttttggagaaaaaagttgacaattgccaagggtaatggatgggaagggaatgtgactatacagggatagcgtgagggtgttctgtgggggtgatgaaactcttttgtatcctgatggtgtttcttcattaaaattcatggaagtgtgcacccaaaaaaactaatggtcctgaataatatttttaaatgaaatatttttaaaacactatttccattttacacataggaaaaatgggacatagaaacatgaccaagacactcagctagtcaaaataggaattttcatggttaaattttaggttgagctcctagagatggtgtgttttataataatgtgatgactgtgtatgagtgacttaatatatttttctcatatgttagtagaacagtaagatagcaaatatatttccattaaaattacaatgaacatccctatctttaaaagaaagcaaaaatgtcttagtcagtgatgactatttcaagtaatattttacatgatcacattcttatgaaagcataagttttgtgtagtgtttccgtggtttgatgctgaataattagtgaataagatattggttctggagtcaaactgcctggctccatatcccatttctttcacctcttagttgtttgaccttcattaagtaactttaggaatattagcagggtattaatgtttctgatgtccattgggctgctgagttagaatactcaaagctaaccctatcttttatatctaaatagaaaaaaaatgtttagtaattgaggagcatatgagtaaagagggctaacaggcctcctttaaatgacaaagtttctaatgaatctttccagagcaaggactcaggggtgtccactttcatcagatcatgtaaagggatagccagttcccaaaagctaagattcaaacatctaatgacctttgagatcctatgaaacaaaggatccttgttgatcctatgaggccaagcaattctctaagttgacttttagcaactagccagggaaagtcatgaagagcttccaaactttgaagagaaaaagactttccattttgcaaaatgtcacagcctagaatttaggtcctagaaaaagcattttgttctgacaaaattgacatttagagactttatgtcgattgtatgctaccactattgacaaatagagggaatcaatttttcaagtctatctggagaacgtgacagatgatcattcacatattgcacaacagttgaatcttataggggaaattaaatatcgctcagtttgtttcctattgctgctataaatcatgaccagacacttcgtggcttaaaaccacacaaacttactttatacatccaaatatcaaaagtttgaaatgggtctcattgaactaaaactaagaagttaacaagagctgcattcccttctggaggagagaatccattttcttgccttttccaccttgcagaggctgctcacattctttggcttgtggaccccttccattttccaggccagcaatgaccagttgagcctttctcacttcatattattaaacttaatcacatctgttgtcttcattcccctttgccatgtaacataacatagtcacaggttccagggattaggatgtggacatcttagggaggccatgttgtgcttaccatggtaaggtaatggttaagcagttgtgagaattaagaaagcattgtcgtaaactcttggggaataactgtcacaagtgaaacaaaaaaagatactgtgagcctgagtgcaagaatatatgaaaaaaatgctaagtatagatttgctataaattaagcagctgcctcagggagtggcagtaggatgatattagggttgggaactacagggaaatgggggagtgcaatcttgttaatgacacttaaatcttgtacaaagtggtacacaagtcttttatcattttgatagagtgaacagtgaactacaaggactggtacaggggataatggggtgttatgccaagcgaggtaactttctagaggtatgtagatacaatggaccaagttattaaatattgttctttttagtagattttgggacagtttcaagaaatgcatagccagattgatagacatctttaaggggttagcatcctgtatgaatcccacatctgagcagtttttgccccagaggatcttggagacacattcaaagtcagagatgttgataacaaaggcatcaggtaattagctggtgctaccaccaaattataggccaggcattcttctcctgggagttacagaaagagactttcaggtgcacatttaatgctggtatctcatttacaaagtggatctcttctcaacagatgcactgaagtggaattactaaacaaaaaatatgttgattcaagagaaagaaaagaaaaataaaggcagaatctgaaaattatttgatatgtgtaccgctgagacatttggttattcctagaaagggataatggaaaattagaagggtttttgatagataatatacctaccaccagtatcaatcttctatttttacaattgcatagaaatttctcactttctatgtcaagggcagttatggatagatgagagcagctactttcacagagaggtgctgttttgtcagtttgtccttttttttttttttttttgattgtgtctttctaagatacactaataaaggcaaagtaggtgttctcccagtgtcccttacaatattgaaagttgtttttgtgcagactagacatagaggtgccctcattcttggctttatctaattgcttaatcccaaaagctgttaatgtggtctgaattttttttctttttttctgagccaaagtatcttctaagtgcttagcaagctcttgtaatttagaaggaagggacaatctactgtcttatcttctgttttatgggaagttatgataccttcttcactgatctttagagtattctggaaggtggtagttaagtgatctctgaagccaggcatggatttattttttccttgtttacaggacttttttgtggtaaagtatacaccacataaaatttatcattttaaccattttttaagcacacaattcagtggcattgagtgcatttgcattgttgtacaatcattaccaccatccatctctagagctcttttatcttctcaagctcagactctgtttccattaagcactaactttccactccctgttatcttcaacccctggaaaccaccattctgtttttggtctctatgaatttgactactctaggtacctaatataattggaatcatacaatatttgtctttttgtgtctggcttatttcacttagtgcattttctttcttttttttttattatactttaagttttagggtacatgtgcacaacgtgcaggttagttacatatatatacatgtgccatgttggtatgttgcacccattaactcgtcatttaacattaggtatatctcctaatcctatccctcccccatctccccaccccacaacaggcccctgtgtgtaatgttccccttcctgtgtccatgtgttctcattgttcaattcccacctatgagtgacaacatacggtgtttggttctttgtccttgcgatagtttgccgagaatgacggtttccagcttcatccatgtccctacaaagaacatgaactcatcattttttatggctgcatagtattccatggtgtatatgtgccacattttcttaatcctgtctatcattgttggacatttgggttggttccaagtctttgctattgtgaatagtgccgcaataaacatacgtgtgcatgtgtctttatagcagcatgatttacaatcctttgagtatgtacccagtaatgggatggctgggtcaaatggtatttctagttcaagatccctgaggaatcgccacactgacttccacaatggttgaactagtttacagtcccactaacagtgtgaaagtgttcctatttctccacatcctctccagcacctgttgtttcctgactttttaatgatcgccattctaactggtgtgagatagtatctcattgtggttttgacttgcatttctctgatgcccagtgatgatgagcattttttcatgtatcttttgtctgcataaatgtcttcttttgagaagtgtctgttcatatccttcacccactttttgatggggttgtttgttttttcttgtaaatttgtttgagttcattgtagattctggatattagccctttgtcagatgagtagattgcaaaagttttctcccattctgtaggttgcctgttcactctgatggtagttttttttgctgtgcagaagctcttgagtttaattagatcccatttgtcaattttggcttttgttgccattgcttttggtgttttagacatgaagtccttgcccatgcctatgtcctgaatggtattgcctaggttttcttctagggtttttatggttttaggtctaacatttaagtctttgatccatcttgaattgatttttgtataaggtgtaaggaagggatccagtttcagctttctacatatggctagccagttttcccagcaccatttattaaatagggaatccttttcccatttcttgtttttgtcaggtttgtcaaagatcagatagttgtagatatgtggcattatttctgagggctctgttctgttcctttggtttatatctctgttttggtaccagtaccatgctgttttggttactgtagccttgtagtctagtttgaagtcaggtagcgtgatgcctccagcttttttcttttggcttaggattgacttggcagtgtgggctcttttttgggtccatatgaattttaaagtagttttttccaattctgtgaagaaagtcattggtagcttgatggggatggcattgaatctgtaaattaccttgggcggtatggccattttcgtgatattgattcttcctacccatgagcatggaatgttcttccatttgtttgtatcctcttttatttcattgagcagtgctttgtagttctccttgaagaggtccttcacatcccttgtaagttggattcctaggtattttattctctttgaagcaattgtgaatgggagttcactcatgatttggctctctacttgtctgttattggtgtataagaatgcttgtgatttttgcacattgatgttgtatcctgaggctttgctgaagttgcctatcagcttaaggagattttgggctgagatgatggggttttctagatatacaatcatgtcatctgcaaacagggacaatttgacttcctcttttcctaattgaataccttttatttccttctcctgcctggttgccctggccagaacttccaaccctatgttgaataggagtggtgagagagggcatccctgtcttgtgcccgttttcaaagggaatgcttccagtttttgcccattcagtatgatattggttgtgggtttgtcatagatagctcttattattttgagatacatcccatcaatacctaatttattgagagtttttagcatgaagcgttgttgaattttgtcaaaggccttttctgcatctattgacataatcatgtggtttttgtcgctggttctgtttatatgctggattatgtttattgatttgtgtatgttcccattcatgttgtcgtacgtgtcaggattttattcctttttaaggtcgaataatgtctcattgtatgtatataacacttttgtattcatttattcatcagcggacattggggttatttctgcctagtgactattatggttaaagctgccataaacattgatgtagaaatgtacaaatttctgttcaatctcctgttttcaattcttttgggtttatacccagaagtggaattgctggatcatatggtaattctatgtttaattttcatgttaagaactgccatactgttttgtggaacattttaacattttatattcccaacaacgcataagtgtgccaatttctccatattcttactgtttattattttatgttttttataactatcctaatgagtatcaagtggtatctcattgtggttttgatttgcatttccctacttattactaatattgagtatattttcatgtgtttattggctatttgtatgtcttctttggaaaaaagtgtctattaaagttatttgcccatttaaaaaataaggtctttgtttcatgtttttgagttatagaagttctttatacattctggatactacttccttatcagatatataattttaatatattttctcatgagttgccttttcactttgttgacagtgttctttgatgccaaaaagttattaatattaattatgatgaatccaattcatcttttttccttattgcttctgctttcagtgtcatagccaagaaatcattggcagacccaatgtcatgaaatttcccctttgctttcgtctaagaattgtaagttttagcttttacatctagatctttgatccattttgagttagttttggtatatggtataaagtaagggttcaatatcattctttggcatgtggatattcaacttttccaacattctttaaaaaaaaaaaaaggtcctttcctcattaaatggtcttggcacttttgttgaaaatcatttgcccatatatgcaagggttcatttttaggatctctgttctatcccattggtctatgtgtctgtctttgtaccagtaacacacttttgattactgtaactttgtagtaagttttgaaatcagaaagtgggagatctccaactttgttctttttcaatgttgttttgactatttgcagttttttgagattccatgtgaattttataatggcttcttctgcttctgcaaaaagcattgggattttgatagggattgaattgattctgtagatcacttgagcagtactggcaccttaacaacattaaggctcccagtccataaacatgggatgttcttccatttggttatcttctttaatttctttcaacaacattttgtagtatttcagtctttcgctttcttggtaagctcattcttaagtctttctttttttgatgttattgtaaatgaaattatcttattaattttattttcatgttgttcattcttagtgtatagaaacatacctagtttttctatgctgactttgtatcttgatactgtgctgaattgtttattagttgtaacaggttttttttttttttagaatctttatagttttctctatatgatatcatgttgtctgagaacacatagttttgcttcttccctttcaatttagatgccttttatttttttctcttgcctattgctctagccataatatccaatattatgtagaatacaagtggcaaagggtggcaaccttttcttgtttctgattttagaggaaaagttttccgtctttcactgttgagtatgacattaggtataggtttttctcatatactcttgattatgttgaagtagttttcatctattcctattttcttgagtggatttataatgaaagagattgaattttgtcaaatatttgttctacatcaactgagataatcatgtgtttcttttttttcccctttgttctattgatataatgtgttacattgattaaattttcatatattgacccatcctggtattccagggatatatcccgcttggtcatgttgcagaatcattttgatgtgcttttgaattcagtttgctagtattttgttgaagatttttgcatcaatattcatgagagctattgattttaacttttttcttgtggtttctttggtaagttgtatgtttctagtaatttgctcatttcatctagtgagatggatttttggccaataaatttggaaagaaaagatctcaaggatagctgctgagagttattgtcttattatttatactccttatatatctatgtttaattaaatattgtcccatatttttatatcattttggtaaacagtacatcttgcttttactaaacaaattttaggatatccagggctcaccaaaaggtgaactaattgagaagaagtccaggactataaatccctaaggcagtcctaaattcttcagtggatttgtgccatttcttaagaaagcttgacaagtcattaattggattatagaaatcttacctggaccatggttgaaggccataagacccatcagattggtcatcatactcacataccttataagatataatgaagagatgttgtccaggggaaaagatatgttcaagaaagaacggtagagaaaagggaagaaggtctgttgaaggtgtaggaagaagaggaggagcaggacaaaagagagaaggaagtcagggttccgaaggccacgagggaagacaaccacagtggggtcatgagatagagaagagaaatgaagcttggatttcagatccaccaagtttttattagttcttttgaaggtatccttaagggaagccatttacaaaatcttctgtcctttagagttgtctttataccaaacaaacaaacaagctaactcttggtatttagagtatttgagtcctttgattttaaggtaccaggcaaaagattatctaattctgttttttgttttttttgtttgtttgtttttgttttttagatatgcccaggctggagtgcagtgaaacaatcctggctcactgcgcactctgcctcccgcctcccgggttcaagcaattctcgtgcctcagcctctcgagtaggtgggactacaggcatgcaccaccaagcctggataatttttttatttttagtagagatggggtttcaccatgttggccaggctggtcttgaactcctggcctcaagttatccacccacctaggcctcccaaagtgttgggattacaggtgtaaagcaccacacctggtggattatcttattcttatcccaaatttcccagactgtcatgtgaagagaaatgtagtaaaattcagtgtgtgacatagcccagagaagtactagcacactgacttaaatacagtattttttacctcctctcatgtaattaaccttcccaatgggagtattttgtttggttgaacaaatatagtttggtcaaggaaattatagtcataagcaatataaatttatcaatagttggtttttgaatccactctacgttccaaaagaaaattacacagaacaaaaaagtattcctagatgtttttctataatgccacatagtccatgtcaccagacctgatggtgaggaaatagacaacatagacttacctgtaagttgccatgtgtgtatctgatctgacacacgtttatacacaaaaactttggagtcatttggaaattttgcaactccaatatgatattattctctttagtaattctgtcaatcagttgggatctgcaagatgattgtgataaaagttaattgttagtcatagcatatttttttaactgatgtaatgattattattgtcctaaattgacaggtgaagtatgctgtccagatgaacagcacaatcgggtttctgttggcattggtgattcctgctgtggcagaatgccgtactccacctcaggaaaccagatttgctgtgctgggaggcttcatgatggccatggccagaagtgctgtggcagacagattgtgagcaacgatttagagtgttgtggtggagaagaaggagtggtgtacaatcgccttccaggtaaggggcccaggtctacctttcagtagatggaggatctgagaagcagagagagtgagaaatttgccctagaaataaaacaaataagtaattaaagctcacattggttatatctaatgcaataattaggaacatattgtttaacacataacaatgtaatctcccaatttttacatgtatctcatgtatttcataaaaacgcatcaattttttttcctcttgaaaaggtcatgtcctccaaaaaaaattccacacatgaatgcattggttatgaatgaaaagaatatttcctagcaaatagtatacaaaattattataatgatattttgttataattcttttactcccttattctactgtattaagctaacactaatataaataacaataagtatcattgaatgaatactaacagacactgtgccaatattttatatattattacctcaaataatcttcacaataatcttacatgataggtactatcaattatctgcattttaaaaatgaagaaactgaagttcagacattagatattagacattatcttgctaaataccacacagtcagatccagattttgggaagcctgacatttatgttattggaggtggggcttttaaagacaagaaaattaaaatatgaagttaatgttcacagtatcttcaccaggcatagattccatctcaagaagccactttctttgctcctccctaagaagcaactcctcatctgttagttttatgattgcagcaattcagttacctcttcaggcttcacttctcattccagttctcttgctatttccactgcatctgcagttatttttcccattttgagtctaaaaccccttagtcatccatgagggttggaatcaacttcctctaaactcctgttaatgttgatattttgacttcttcccatgaatcatgaatattcttaattgcatctagaatggtgaatcctttccaggttttcaatttactttgtccagatccatcagaggaattactatctatggcagctatagccttacaaaatgtatttttaaataataaaactggaaagtcaaaatgactacttgacctatgctgtgttaataggcatgtaaacattaattttcttgtctatttccatcagagctcttgagtgaccagatgaattgtcagtgagtattaatattttaaaagaaatatcttttttctgagcagtaggtctcaataatgagcttaaaatacatagtaaaccatattgtaaacagatatgtaatcatacagcctttttgttccatttacaagcacaagcagaatagatttagcataattattaagggccctagagtttttgcagtggtcaatgagcatgggcttccacttaaagtcaccagctgctttagccccccagcaggagagtcaacctgtcctttgaaactttgaaaccaggcgttgactttttccctctacctatgaaagctctagttggcatcttcttccagtacaaggctatttcatctacaatgaagatctgttgtttagtgtagccaccttcatcagtgatcttacctaggtgttctgggtaacttgaggcagcagtttctacatcagcacttgctgcttcaccttgcacttttatgttatgaagatggctttttttcttaaacctcatgaaccaacttctgttagctttcatctattcttctgcagcttcctcatctctctcagccttcatagaattaaagagagtaagagccttgcctggactaggctttggcctaagggactattgtgactgatttgatcttctatccagaccactcaaagtgtcttcatatcagcaataaggctgtttcacttattcataagtgaatgataagtgaaatagaaatcttacctggaccacggttgaaggccataagacccacaagatttgtcatcattctcacataccttataagatataataaagagatactgtccaggggaaaagatatgttcaagaaggaatggtacagaaaagagaagaaggtctgttgaaggtgtgggaggaagaggagcattttgattttcttcaagaactgttcctttgcatgcataactgggctaactgttgggcatgagaggtctagtttttggcctgtcttggctttccacatgccttcctcaataagcttaatcattcctagcttttgatttaaagtgagagacatgagactcttcctttcacttgaacacttagaggctattgtaaggtaattaattggcctaattttaatattgctgtgcctcagagaataggaaggcctgaggagagggagaaagataaaggaacggctggtctgtgaaacagtcagaacacacaggacgctcatcaactaagctttccgtcttatatgggcaaggttcatgacacgctaaaacaattaccatagtaacatcaaaggtcattgaccacaaatataaatataaaatataaaaattaaaaatataaaaatataacaaatataataataatgaaaaagtttaaaatattgtgagaatcatcaaaatgtgacagagacacgaagcgaacacgtgctattggaaaattggcaccaatagacttcttgatgcagggtggccacaaaacttcaatttgtaaaaaaatgcagtctctgcaaagtgcagtaaatcaaagcacaataacgtgaagtaagcctgtgatactaaactactatatgcctttttaactcttattctctcctatgtgtacagcagagcttttcagatgttacatggcatgatttgcaacagatcgaatgcagactcagaaagaaaattaaattgacttctcttaactaaacatttaaaaagcttgcaaaaatataacacaatgtcattcttctattttttatttgaaaaacatttattttcataaatatgttagaatgttatagatttattattttatgtctaaatgcattaataaatatttcaaaaatttctgccgtaagttttaacacagtacatatcaacaggtaaaacccatataaacaaaaggtatttggggtcctcaataattcgtaagcgtataaaaggatcctgagaccataatttgagaaccactgcttaaagtcatagtaacgtctactagaaaattatggcaactaattagttatcctgtactatgactaaccagttgaatacctcctcctcctttagatgaagtagctaataacaggtctattaaagatagaaccaaggtggcagggagggtgcaaaagtgttacctcctgtgtactctaatacatcagagtttaaaaatgacagcaaaatatttgattttagtgtgtttgttcatctgtagctttttaaaagaattagtcaactgctatactccgtcctttgttaaatatgtattatgtagtaaccatattcaagacatcattcttggtgctttgcaagtgtaaaaatggccaagattccgtttttatcctcaagaacttacaacctaatcaaggagaaaagtgcctacaaggttatacacagaccataagagagggatgaatgcatgcatattcttaagacggagagatcactccagtcaaggtaatgaagggggttgttccattggattggaatctcaaacagtgagtatgattttggcaggtgtggcttgagctaaactgtgaaattagcaatctgcaaaacacaaataatagcgtgtgctttggtttacaggaggtatacactctgtgtaaggaagaaaggagataaatctgagtaggcaaaaggatttgaacattatttagcactcagggaagagtcaatatgatgataagaactgtagtttaagattaaatttaggtgtcagaacaaatacaatagagaaggaaagagaagtcagaacacccctggcatgaagtaaaatacatctgttctaagaagtggaatggaggttaccgtccactaggacaatggttcttaacttgttttccttttgaatcttttggaagttacaaaccctcactctgaataatagtgcatggaatatacacaaaaatttgcctgtaattttatccacccttgaactccatccatgaactcaaatttcagaatcacttctttatttactccaagatgatgtcgcatgccagtcaaacatttcttacacaaatggtgacagccctcaactcttgcgaatcaagataagctctagagtttctcatggcattctacagctctgccaactctgataatcatagtggacttaaggaataatagttttacaaaggaaaaaatatatctttttattctcttgactttctttctgcaggttgcactgaaaatagacagattccacatgtatttttcctctctctgctgccgttcactcctgtagcccctaatgactgtgaccttaatgaccttccagaatatccatatggccctttttctcctcaacctagcaacaaacagcatacctgctacataagtgtttggatctcataatatcgttcctaagcctggcctctctcgctgcctggcattgtgtgcctgccacgagaccgggctggctcgtaaaacatctctttatgtactttattacttaaactcttttatttgcctgcaggagccctttaacaaaatcacattgaattgactttctcacaccaaatcaaatctccctggtcccagttcagttgtctttgtcaatatgtattttataaatggagtgaattaacagatgctgttggaacagaagtgctggggtggcgtttatgtttttagtgctctctctgggcagatgcgttgtgtagaagtgttatacaggtatctcgggatgaaagtcatgcgtgtcatttcagtggatatgtattcttagccattttctttgaatagattttaaacctatttattactcatttttttcttagtgtttgcttatatagctttatcatttatgccattaatcttggattggacttgattatatcccttagtatgaaaaggtgaaaaattaaaacctccgtttcattcaaagaggacagatttttctattagccatgggaaactgatcatgagatgactttggaatatattgacttatttatattataaactttgtccatgcggcctttgatgtgaaactctgagttgaaattgtttcagaatacaagactgagttttcatgtcctggactctgacttcagtagaacaaatgactatcgctgtttgtttcataagatgggaatttgggaattttgcagagggaagtataattacagaagtccatggtgtaagggtggcattgaaaaaacatttccctggaagatttccataaaacagaatgattttttttttgaaaagtgtaatatatcagtgctataaaatgtatcacaatgatttggggagcatttttactctaccctctgttttgtggtggtagtcacagagccatctactggtgaagacaagtgtgaatttcttttctttcatgctctgccacaaatgttatacatttgtcctaaggatgactaatcacaaaccttttttttcttctaggcctaaaatatcccttggcttaaaatttggtccccatgaacaatctcagagtttcacaatgatttgtcatattccagactggattttactactatactatttttatctcaaaggcatgatacataattcttggtcttctttaaaaaaaagtggaatcccagttttgcagtcttaactatttagaaattcatccaacagatatgcttataaatgcttttctttttagacatagatatgaaataagcattggtaacatatttgaagtattaataatattgtgagtaaaaattttttcctccactattttctcagttgtgtccaatcaatggaaaccattggatatatatacagtttagaaagacaatatatgctttttcatctgaaaaataaacacctactagtttaatgtgtactgtaccactttactaacatctgcattttgttcaaagacacactccaccttttgtacaaatttaatgaagaggctctggaagaatggaccaatccatcaataatgcatgacctattttgtttttctttgggcatatttaaaatcgtgcattccgtgtgtcaaagttcaaaagtcaagtgctacatgtgataaattaggtaggggtcgaaagttattgcaatgcagtttcggaagattgtctgtctctgaatttgcagctcattcatgctgaagtgatgcactatgggaattactaccaaactctgctccgcaacatctgctctccctaagtgagttagtgcacgtcagacatctttatgtcagaatattgcagtgatggatgcagtcttcagaaaatgctgcataaaaatctggtgtgccgttctggccattaagtgaaattactatttaaattaatggcactgtcacagtttatctgtgcaaagaatgaacgctgattagggtattaagtaattagcaatttatcacactggaacaaggttgataataattaaagaagtaatggtttaccaaagaatctaaaaagggagtcacttcttgttatgtgagtgaaatcttggctgaaaatttcaattcagtaatacaaagatgaagctctttgtgaaagaaggcatcttttttttctagtttaaaaacagttcattatcaaaattttagttgacctgtcagaagtccctcagagtgatcagatgactgattaggagtttcaaattaggtcaatgtctgcatttttattttatacttaaagcatagtgaaaccatgaagtaatttgggaatgagagggggagaatatattccgctccctaaagggccagttttcaaattttgattgctctttaaaagagaaacatgaattgtcttcagaaaactgccagagaaaaaattaacagtaaaaaaatccatggttgtatttaaatgtctaatcagaaggggcagaaaaatgcccgaacaatataaaacttgaagctacggatttttctttttagtttatgtgtgtgtgtacactcatgtatgtatatatttatatgtatttgtgtgtgtatatatacacatacatatgcatacatacatagctacacacacataaatatgtgtatttgggtatgtacttatacatacacacatatatacccaccataatccagactcagactaaaatgagccctgctctttgtattaatttgagataacttttcctagaaatgttaaaaccactaaaattataaatatagcagttaatttgtaaaccaattacttcgaagagttatcacattagataaacatggtatgccaaagctctgttagaatcagtgtatatcattaatcataaataagagtttttaatattagagacttttgtaagtaaaaagatgaatgagagggttctttggagtcatgtgtggataaacatctttcttaaggcatgtgccaaaccaatgtctactttcaatgattttttttaaaagcacttttgatcttttatttgagtgtctttaataatgtagatgtttacacaggaccagattaaacaattcaggaccccagggcactttgaatttgaggttctttatgttatcagtcggaactaataataaacaaacaaaattccaattaaaataaatcattcatcacattgtgctgctatataactggatataaattctaatataaaaacactgtgacatgcagtatagccaccttgatttctagcttgatctgtctctagagtagtgttaatttattcctgctttaatgttaaaatttctgccatttctctttgatggcaatatctaaatgatgcaaatgcaggtaattaaactaaatttggtgggagaaaatgtctatttggtatctcaggtacgtgtgtctttcgtttagatgtggggatcagtgatcctctctacaaggtctttctgcggctgcccccagcctgtcacctgtgtctgtgatgggtctagaacagagtgaggctcaaaaaatagtggctgattagtgcacctgatcagtgaacatgctcagctgattatgaataaataccaaatccatctcatgcagaaaacatggttaccattgcagctaaattcacaagaaacaaatatttgtaccctaaataaagctaagccaaaacttgcactgcttctcccgcagggcttccagttctaggatggtgctacctttccactctgcctgggcttttatcccagagtacttgggtgaccttttctcccttatgaatttctagagctttctcagagtccctatagtttaactaaccttcttctgcaacaagatgttatcatcacaaaatgcgcaggcagttttcatgacagaaatcctatctctttttatggagcatgagagaagtttggcccagctgaatgattttcgaacatttcctcttgtgtgttcttttcctaattagtgtctagtgctcttggtaagaaggaccctcactgcacatttaaatcaccttggtagggaaatgctaccttaggtattgcaccatttcagcaactgcctgagcctgacatttttataccaaactttatagcagcctcagttttcttccctttttctatttcatattcatatataacattttattgttgcaggtatgttctgttgtgggcaggattatgtgaatatgtcagataccatatgctgctcagcttccagtggagagtctaaagcacatattaaaaagaatgacccggtgccagtaaaatgctgtgagactgaacttattccaaagagccagaaatgctgtaatggagttggatataatcctttgaaatatgtttgctctgacaagatttcaactggaatgatgatgaaggtaattgatagaaaagctctcggaggcgctgatttgacaatggaaagagaaatacattgttcataactatttttctaaaataggaatataaaaactcctgtgtgcattattcattttcacattacatccatattaataccgaatgagttcgctatgattgatgttattgcaatgaattctaaaggaattaataatgattagctgttctcagggaagctttacccagcacttcagattagtgcaggactgaaagtctgtgtgccactgaaagagccagcacaggtcgtctggggcctctgcatggtgccatttcatgcctgggagcactgtggatggaggcaggaggaaattcccgcttcttctccctagcccgccagccatcatccaccactttcctttgatagagaccttagatccagcaaattcgcttagttgcatttatatcatattcccttggacaatgcaagatgagcaaatgcctgtgtcaaaagtgaatgaataggcttctgggtgtaatcgcttatgtttttgtatggtgatggtttgtacacagccatgtcatgtatgtgggtattaaacttgacccaggataccagaagcctatcaatttaaggaaaggaccatggacactttaaaaataaacatgctaccgtgttctgtagtaatttgtcattataagaccactaaaaatgggtgtcttggtcacagacaatggaaggacgcttgttcaatgaggcaactacacagtccttgtgtagaccacatacactttgtacactttgggatgtaaaataactcatgagattgttagaagccctgcaagcactttgtatcaatgaatgattaagataacacataaggttggttaaattattctaatgaggacaatatttctccatgctgaatcaagtagtgtgtatacataataatgttcagtctgtaggtttcattttgttttctgaagacctaccacctggagacatttatatcctgttccagtctggaatggatcaccatgggatttttacatagctggcccattcggtcttccctaagctatcaattcaggaattccttttacctctttcctgtgttgattcccctgtttttttgttttgttttgttttgttttgttttgttttggattccaagtttcattccatttggagaattatcttcttgtatatagatgtatggagggtaaattttttaaaagcttaatgtataaaaatactattattttaccctccaacaggattgatagtttggtctgatatacaattccaggttaaaaattatgtctactcagaattttgaggcatttctgcatgttttaagcttccattaatattttgattcctatctctctgttggtaaccatgtttcttttcctatgaaagctcttgaagatgttctctttatcctgctcctctaaaatttcatgacaatgaacctctatgtggaagttaggatggtttctttttgcattttgttttccatttttgtgatgagagcatttaggatctactctcttagcaattttttttttacattacaattcattatgagttaggcagttgtcttccaagtaacatctctagaaccgaagccccttacatcttgtgatgcttcatgcagcccttggatcataatggaaaaggcgcaagaggggacaattgcacacagacagttcctacctggatatagagtacatcctttctatgcactagtcacacagacatatctagtcaggtggcttctcctactgcagccaggtttcaacatcccatgttcccagagagaaaagggaaacatggacatcactgagcacattgcattgtctctgccacattcatctactttccagcttccaaaaaggtatgcactgtcttgtgtgtattatttttctccattttttcttagactttcaacacgtaaaccagtattttactgtcatttagttgggcttttagaggatagatagatagatatagatagatagatacacacacatacacacacacacatatatatatagtgggattctatttatgtagtgtcatcttggctcactgcaacctctacctgctaggttcaagcgattctcctccctcaacctgccaagtagctgggattacaggtgtgcgccaccaagcccagctaatttttgtttttttagtagtgacagggtttcgccatgttgatcggtctggtctcgaaatcctgacctcaagtgatccacccacctccgcctcccaaagtgttgggattatagacatgagccactgcgcccagacccactatatatttttgaatgtactattttgatcaacttggtaagaataattcaacttattttatgtaagagagaggctgaatggagatcaattttaatagcaaaaagtattctaaatacattatgctacttatgtaaaggaaaggcaaagtagatctccacattataaaactattaccttacttatagctcttgtagtgtgggatgattaagtatttaatttccttggattaaaacaaagtggtacttatcaaaaaccataaaaaatctggagatgtgtcagagaaaatgtttataagcgtaaataattataattacaatgacagttcatgaaacatttatatttttaaaaacttggatcagtaatacttctaatgggaccaacttccccaacaacacaggaagtgtaaattctcaaatatcacattctttattttctctaaaattccataggaaagtatcaaatagcaaaaataaaatatttgtagtgtgtatactaagtttaaagacttatcagttttgagtcacacaacaaaccttggtggtaaattatatgatttgagtcacacaacaaaccttggtagtaaattttgtctccatgttccccactgaagaagctgaggttttgaaaacataagtgacttgctcaaggttacagagctgggaagctgcaaaactgaaattttaatcccaatttgtgacatttcaaagtcattgttcttcctagtatacaaactgccttcatttctttttataaattttgaaatattcattcatcaagtaagtggaggaaaaatttcatttgaaagtcacaaaagcctaccctatgtatgtctaaatgaaatttttaaatacccctctctctctcacccctgccacttgactcaggaaaccaaagagtgcaggatcctctgcccagcatctatggaagccacagaacattgtggcaggtgtgacttcaactttaccagccacatttgcactgtgataagagggtctcacaattccacagggaaggcatcaattgaagaaatgtgttcatctgccgaagaaaccattcatacagggagtgtaaacacgtactcttacacaggtaacagaaagcaagctgtctgcccatggcttaatggggttagtgagaagctgctgaaaatgcagatttatttcactctgacatcaactctccttaaactgatatcagtacattccatcatactttgaggccagctagttacaaggtaattaaaggcataatctggatgtattcaaagtcagtactttaaaatgtgttaaagtctatttaaacaaggttgtattccatattaaggtaaatctgtggagatatctgtgacctttactgctatatccagttaatttacaataaatccaatttcctttttcaaaagctgcaatgcagcttccactgaatgcattgaatgaatactgctatactcttaagcagaaagaaggatgaacctgtctgattaataataaaacctaacagtgctactctgaggatgaggtaaacccaagcatgacatttctccaagatggctggtcatctccaaaagaataacctttgcagttattgtaaatattaatttctatgtaccatcttggccctgctgaattagtccaaaatggttatgcttagttttggctgagctgtgtgagaaacactgttaagtttagaattatctctaaaacagttctgccatcaattaaatttgtgttattcatccatttacttaagtccctacaaaatgtgttcttgttttttgaaaaatcaagtttgtgtgtgtgtgtgtgtgtgtgtgtgtgtgtgtgtgtatcatctatcatcttgattcaatagaatccatttaagtgacataatttgagcaagctaaggttaataaacaagcaaaacattgctccattccatcatgaatcatcagtctgctttactcaaccaaggggcaataatggctaacctcaagagtgcagaaagtaaggcaggctactaagataagaggaggaagattaggaagggaagaaaggaacagagataaggttgattgaacattatttagtctcaatgttatactaggtactttaatttttttattatactttaagttctagggtacatgtgcacaacgtgcaggtttgttacatgtatacatgtgccatgttggtgtgctgcacccattaacttgtcatttacattaggtatatctctacactaggtactttaaaaccttatctcagttaccaacaaagcaatcatataaatatggtcatttaacagatgaggaaactgagggtcagatctgtaaaagttactcgccatgagaaagaaacatattcaaataatgccatcatcaaaagggacagactttgaagactccacgtggtgcaggagctcctttcagagtgctccaaatgcacttcaagctgttattccacctgaaatgtcctcctttatcatcctactcaaggcctaggtcaagattcttttcctcaatgcagtccctgtgctgctatggcacattgttcacaaagctcactagctctctcatgtgtcatatggatttggacacttgttccagctcttctattagattgaaacatccttatgaatagggcatttttgtttacctttgcctcgttatttggatttagaacactatacaaacaaaaaatatttcttggaatgaatttaattaggaaaggcctcagatagaggacaatttgtccaaccttctattgtgttcccagtcccagttatagatttaagtcatggactttcatttttaaattattgagtttccatctaagagagttctctacttttatctgccccttgtaatcaagatcaagattttgaagggcttttaataaatacttgtaatagccctctccagaagtgaatagatgtttccacctactgatataatgttatgagggcttttaaaatccatatttcagattgctttgcctgcagaaaatactacaaattgaatatgaaaaataacaaactgttctttttcatgaaagatgttcagcacacaagtggtgctatgataattccattgagaacaatttagattaagtcagactcttttagaaacttacacttgaaagctgacaataccagtgctgacaaaaatttattcatttatgcaatcatttatttatcaaaaattatttattaaatacctactaataactagtcactacattaggactagcagctatgatgacaaacaataatttttcattgagatttcaaccctatatgaagaaagaaggaagcagcaaatgagatttgaaatggtaatgtgggcttgaggatacagaataacagtcattaccaataagtagtttaatttgctgtagcagaaatgtaaaacatattgaccatctgagggtaggtagatggtctaggcaactgaatcgcacaaggtcattcaggtatccagaatccagaatggcaaccgaaggtatgcaattttctctttataaaatgatgtggaagttgtcagtgtctttctatactccttcaagtattgagatctgagtcatgtgaccactagaagctacaaagaaaactggcaaatgtggttttctaagcaggaggcctctgaccaggatggaagggagaactggggactcatggttgccatcacaggcaacaagtggcagatacccccgagcagaaaaaaatggaaaaggaagataatgctttacatttgtagagcaatctgcattttatgaagttctgccccataatttattgcattgtattttcatattagttctatacagtgggcagggaagggtttattgtaaggagatgtatataaggagaatgtctctccattaatctaagcatagagactgagaattaactccacgtccaatggagatgagcaggtggccaggcagccaaggaggaaggcctccttttctgatgctcaatctgagaaagagtcatccagaagctaacacacaaaaatacatacatacttacttaaaattcatcaaattagagacatggaaaataaatttaaataattaaactttcaagtaagtttttcaggggaaatgtgtagcattggtatttccgaagttattaaagcctaaatggaactaagactttggggacacaactgaatcacatgagtgttcatctaatacaatttttgccagtttggaaagctcagcaggcttggttttattgttttaataaagttggttggtttgtattttggttttcagttctggcttttgtggaagagggaaggaactagatagcagagtatgctttcatttttattcactaacatggtaccatgataaactaagtttcaaatcctgtatattgtaacaacattataatccatatgatttaaaattttttaagtaatattaacaaagtaacagaaagcaataatttataagttctatgatactaaaactataaaagaatgttgccaaacctgtctcatgtaggaatcaaaactacatgaatttgtgaagcactaaatcttattatacatgattccagtgcttttatttttcatttatttaatatatccctctttctctgctcagaaacagggaattctattctgtgcaattccgtatccctgcatctaataaatactttaaatgttacttatatttagaaaataaagatattagagttttatttatatacaaagcgtttagagcattaaacatttatttttaaatgtctaaagtttttgatattcacttttaatatgatggttaaaaaatgaaaataagagaaacttccctgtctattttttctctttccagatgtgaacctcaagccctacatgacatatgagtacaggatttctgcctggaacagctatgggcgaggactcagcaaagctgtgagagccagaacaaaagaagatgtgcctcaaggagtgagtccccctacgtggaccaaaatagacaatcttgaagatacaattgtcttaaactggagaaaacctatacaatcaaatggtattgagatacctttaaaatacaaataacaaaatcccataaattcataagaaaattgaaatgagtacaatctacatttaattgccctatgcatctaaccactagaaaagtatgttccgataaagggaactgtaattatgtgacaactaatcactcactttgtggtgtagtcctcgtagatttttagcctaaataagtaaaaaaatagaaatgaaagttccttgaatcccagaatatatctgagctgctttcaaaacaagcaaggcatattcagagaaggggaaagagttttaatattgaaagtaaatttgtttcatagtgaaaggaaataaacataaatgactcttatcatttatgtcaagaatccatctcctccataatagtataattaggaactgcttgagacagcaatataataggaaattaaaattaaataaagctatagtattgcatttcttccgaacactaagatttgtaagttgtttgcaaatagttaaaatgatatcacattcaaatgcagtcatttttctgcttcttttaggtcctattatttactacatccttcttcgaaatggaattgaacgttttcggggaacatcactgagcttctctgataaagagggaattcaaccatttcaggaatattcatatcagctgaaagcttgcacggttgctggctgtgccaccagtagcaaggtaagaggagtttgcctaaactctgggaaaaggggttcagtgtgaagattatctgaacatccaggttgtgactgcttttttcattgaagaaaacaatgtccctcctcaaagtggtgttaagtagcgtgttcatgtgtcacgttaactgagtgctaatacctatggctggaaggagagatcatttcaagggagatttatccaaatatcaatcttgtgttaatgaaaaacaagtgaaatcttgaagcagtaccatcttttcttccacattctttcctcaccaaccaattttaggtaatctataaatctataaaaatgtccaaatcattattcagttaaagaaagtttctatttaaatatgatatgaacaaaaattgtctgattttaaaaaatgaagagaagggcaaaaaagcctggcacggaaaacaaaattgttccaagccttctgctatagccttgtcaagaaataatgaagacctgaatttaggcagcagaggtcagaaccgagaatacagaatgatacaacagacatgggggataaaatctacaaaacttggtactcaattatatttacagaaataaaaggaaagagtcacggatattgtcaaatatctgcttgagtaatttgtggatcatggtgctattctgcaagcaaatttttaaaaaagagaaaaatgttgaaggtaaaagaataggattctgttttgttaagttttgtaaaaaatatatttaaagagaaggatcagatagcagggtggcggaagcagatagtacttggcactttatgtgaaaatatctggtcagaaaccagattgagaggtgactgaagtttctagaaagatctgtatgggaagttgaagtaatgagtataaatatggacatggaaggagaatagagagaaacaaatatggaatattgtggatgatgagcactggggaatgctaccaaatgaaaaagaaagaaaagcccacaaagaagactggaaataaacaatcaaacaatgtgggagtaaaataaagaaagggacatttcatagaagccagccttgacagaggaagcccaggaggaaacaaacttacacagagtagctctgattcttttcatatgcttaaaactttagaagagcaacatctttgcacactgtgcaagagccatccaaatgaaacattcagccacactgctcagccacagtgcaagaatgcaacattttgttcaacagacttctggaaacctttctgagtgagccaccatttagatagatagatggcagctgattggcccagtcaaaagttattagtcctagaacaattccatgctttttgcataggcacacttcatgcctgctacatgcaaagcaattgtttacaaagtgaaaaaagttaattctatgaaagaagccaatttttgtccaaaactatgttttgacaatattgactaagtaattgatttatttttttcttctgacttgtttctttctttagaaagttggtgcagacactataaagtcatcctaggtatcatgggaagagtaccgaaatgtctgcccatttattctgttcaaagcatattgtatgcaagcaagttcagatgtggcttttgctccatatttactggtgcttaaaatgtatgaaatcaggctgttaaaatgcaaagacactgatgggccatatggaagagagttatcaagagttctctagtaagacagtctgccagccagattttacttgtttaaacactgagggctgcactctgccgtcaaaattgttgttgaacctgttgtgataaatggtagtgtgagacttatgtaatatattcaaggtcagatttcattgtttaaataggttgggagggaaaaaaatgaaaaaaaagggaaatgcttctccaagcccctgctaatgatatgccaggccagacaacattttaaaacaaaagtgacattctcattgatcaggatagctagtgcactattacaataaattgctgcttaattcctacgtcttcaggtagttgcagctactacccaaggagttccggagagcatcctgccaccaagcatcacagccctaagtgcagtggctctgcatctgagctggagtgtccctgagaaatcaaacggcgtcattaaagagtaccagatcaggcaggttgggaaaggtctcatccacactgacaccactgacaggagacagcatacggtcacaggtgagaaaacaaaaaaaaaggaaatcctactggaggagtctgtcattgtggttaggggggcaaagcatcccaggggtgtgtgtttgatatatgaggtcacttcgaaaggacgtgttctcttgacatatggtcaggtcccacttatccatgctaatagaagagcccacactggcagcaatacgccacaacagcagataacttcagaaataatttatatttggccttgatatgcattatgtgaagggtttttgcatcagtattaactttttttttcaaacaaacagtaagatgcattttcattccccaaggatatactcatagttaatgggactaagatagccaagaatatactggaaggcaggggaaaatcagccagaggttaacatttgtctatcaagtggataattaatacacaggactagttgacagtggagtcattgtgactgtttgttactattaggaatgttaattaatagcaattgtgtttttttaatttattataatgtttattatcattagccttaataatatactattagtacagtacaatgatatgttagataattgctagtagtgattatgataataattaacaggttttagcttaaatgccacttctgaagggaggagaagcattttctgacttacttgctcgaataggttctctaacacaccaccacatcactttgttttatttccatcatagacctctcactgcctgatattttagtgtttgttttttgtctttttatgtctctccacacttgaatgtaggctccaagagagcaggaaccttatctacttgttcagtgttgtacctctagcacttatagtcctgaacacattaataggagctaaataaacgtttggggaagaagggaacttaatatgtgccagacgctgtcctaagcactttgagtgcactatgcaatttgattctccatcaccaacctaagatgtacagtgaattactaccttcattttacagaaaagaatactttgagaagttaagtaatttagttcattattcgagtctactgaatcatcccaaacaaccctgttaagtttaaattctaagaccatgggcaagattgtataaactttcccttttttcccattgtcagccacctccttccaagacttcctgagtggatgacctccttccattggactgcactttttgcagggggtgttgatagcacagataatgaaactcacagaaaagtgcagaaaggccttggaaaaatgtgactgatttttcctaagaagggacacaggttacacttacacagggtggcaaaataaattcatcacttttcactcttaaatgccacaattccctaacacataagcaagcattcattgacaaaatctccagtatttttccaaaagggccgtaaacctgcagaaggtgcttaatacaactcttggcctggcacattgtattccttacctcaagatcctgggctaaatcaatgatgatagtgttgaggctgggtgcggtggctcatgcctgtaatctcagcactttgggacgccgaggcagccggatcacctgaggtcaggagttcgagaccagcctggccaacatggcaaaacctcgtctctactaaaaatacaaaaatcagttgggcatggtggtgtgcatctgtaatcccagctactctggaggctgaggtaggggaatcactccaacctgggcggcagaggttgcagtgagctgagattacaccagtgcactccagcctgggcaacagaacgagactctgtctcaaaaaaaaaaaaaagataatggggttgggagaagccctcatatttgaatgatcaaaattatttcttttatcttattttacttgaagtggaaatcatcacaagtgattgaaataatggtgttttacataataaaaccttacttctatgtggtgctttatcatttaaagaaacgtttgcattttgacttctctgactctcatcacatccttgtaagagatgtttttaataatcatatctgaaagatgaagaagaaagccaacctactcagcgtatccaaggcattcactgcctgtatctgaaaggaaatcagaatatcatttcgttctcccaaaaatgaattgccagcttgcagttttccagatagtacactaagtggtctaaaataagactgctgctcttaagatcctctcacgtacagggaagactgacaagaaaagaaataactgaaaacagagctctatacaggatgcagtggtgaaaaatcaaatgagtcacttggagtaagcaatgggatgttaattacagggttttgaaaagcaagtttaggcacattaagactgtaccagcaaaggtttcacaataattgtgatataaggctaaagaaatttcttcttgtagtatctatcaacttaaccagcatcagcttcgaattgttgctactttattggtttgcattttttagaaatcagcatttatacaccaacagaccaaattcaattgtaatgttcaaaccaacaggattgatagcctcattaattataaaataattgcaaagatttttctctaaataacttcaccctaccagttcttcctttcattgacatttttaatggctatttttatgtcagagtagatttcatacatgtatcttggtgccagaaatcctattattagcataaatattttaaggttttttaatataattttaatttttacttaacagtaaaaaatcataatctggtaaaagcctttaggagtcctttgaccaatctccctgttctacttttgatttgttttaatttctatggatattgttttaaatagatttagagagtatttcacttgcccaatacagccctaaagaggggtttctttgtagaataaagaaataagtcctcattcagcaaaaccttaccaagtacagagcctcctatatgtagttctttggggacaggaatggtgctaggcattagataatcggaaacttgagatctatataatgttactcatttgcccaggaaaattcagttccacggttagctgactgaccaaatgtagtactgaagtattttatggtgtgaatgactgttttattgagttcatggaatgaactaaaataatcaaatttattttctgttccatcttaaatgtttgatggaaatgctgcctgaaccccctaggataaatgttttgattttctcatcatttccaaaagcttggcattccctaagcaacacagcactaataaagctgtagcactagtcgtcctggagcctgaaaatctaggtccttaggaatgacaggagggaaagggagcaccttgcctcggccccattgtctccatgcttatttttaattacctcaaagctttagaaacatgatcccgtaaatgctttgtgggaatagtggcgaatgcactcatcatgtgaaatccataaattgcttataatcctctcaagatgttaaaaaaagcattaagtaattgaagacaggaagtcctcggttaattatttagaggtgttatcaatgctttaagtaaactgaagcgttttctgctatctcactgagctgaataccatggggacgaaggagtagcagccatcatcttctcatattcgctaatgcaaacagcgcatggcagcttgtcaataaaagaccttttcatatcatttattactaaacacatccaccatcctgtacagaacaatttggacatcagttatggcattgtttcactttgggctacctctacattatacgtaggcctcctaatgtgagtttaggaatagaagaaaggattaactaaataattaaggccactgagaaaaaaatgaattagtcatgtcctgtttagcataacgtataataagggcctatgtgtctcttactctggaaaactattttcaaaataattaattagaaattactcatcattgcatttcatttaaaaggaaaaactcaccagcattaaattagcaaggaaagaataatttactttcgtttctcatcttcctagaagttaatgaaaactttgtgtgctaaatagaacaaaccctaacaatgctggttgtagcagaaaatgtaatactaatgttatactgaaacagataccttacacttcaccttggaaaaagagaaaacatactttaaccaccaatacaacaaaatgtagaaattctttgtaagggattttatttttagataactctgctatgtgttcccatattatctttgctctcgtagtaattatcacattttattctaatagcctttcctcttgtctctgttccacacttagtaataggtaatgctttttaagtacagagacagtagcttcctgtttgccattgtgttcctggtacctatcacagtacttaatatattcaaaaaatgtttgtcgaatgaataaatactgaatagtaaactagtatttgactacattctgttttgaatggagataaaaatgccactgtcaaacgtatctaaatcgcagacagatctggcaacaaaattgtggggtccagtgcgaaatgaaaattcaggccccttgttcagaaatcattaaaatttcaagacaatggaagcagagcatagaagtaagctcatgtgcttccaagcatggtaccgtgtttgattgcacagtcgaagcccacaaagccaaccctgatctccagcagtctggaattagctgcagtatatttctttaattaaaacagatagcaagaaaactaggatggtgataatgtcctcaaaaagctttgggagtttcttctatggttgtttgcaatgctccaggctgcattccccccagttactatgtaattactgaccaccaagcactggggacctgtgaaaatagagataagaatttgttttcttttcattttttcaactctgagaacaactaaatttgtgcctgaccaaaaaagtaaaaaaaaaaaagaaaaaaaaaagtgtggcatcaaccacttttttgtgttttaaaacctgcctattgataaaatattaaggccaaagaactataattgatagctgcctagacaatgatattttttaaaattccccttaaatcccagatattccaatgtactttgccagatactagttctgttttgtcactccagttctggccacccccttccctctgcaatgtcctcattgtctcacgtttgagcaacatcagattttgctgccacctgacatcacattttgtttttagagaagaaaagtctgcctggaaatgcagagaagaatcctcagtctagcataacactgaacttgaaagaggaaaagtatttattaaaatatttattaaaatactgtcactaaaatcaaaatatatatatcacagatataattcatattatatttttgttgttatatttattccagatatacatcaacattaagactattatttagacaccaccaaagaaaaagggtctttccttggtggtgtctaaataatagtcttaatgctgatgtatatctaaagagagtctgccaaagaagtaacttgtttaggaaaggcgtcttgggatcaggaagatattggagagaggggcctaagctatggcccagaatttcaaatgaaatatagaattaataacgcaagttagcttatagcaagtagtcagaactaaaagtcatgaagtgatcttactggcatgtgcaatgcaagagtccctttgttttgatgttttgatgttcagttcatatgaggtagcaactgaattcataaagcatgaatacagaaaatggacagtacaaatgctgctcaatgggggggaggaaattggcttgggtaagtggaatgggcagctgttgagattgtgaagaatgataccatccagaaaagatggctttagcatgtgaactcccgaaataatccttaatcaaatcctgtaaaacaaattctaatttaaaggtaccttagatgtctgtaaagtaattccatgatgcctttgtataccagttttgaacatctggattttcacagattgtcagattgatctaagtagaatgctgatatggctctatccatcacagtcaagatcaccaggggatgctggaagttcctgggaatctcagtaggcagagatgctccgaaagggatcacttagtgagatcccaggcaagtgagggcaaaaggaagcaacatcattatagttgtctgggtatatactctggggctcgttgtcttgcgccaagaaagaattcaggacacagacacatgtgggtgtgttaaggagtggaaagtttaatagaagaaaggagagaggagagcagctccttgtgagagagagagagaaagacagagagagagagagagagagacagagagagagagagagagacagagagacagagagacatccgtaaagtggggaggcagcggaccaaagcagattttacaggcaggctggagaaggcagtgtctgatttatatagggctcacagattggttcgatcaagtatgacatttacatagtgggaggggaaggctggtcaccccaccctaatcttattatgcaaatgggccttccagttgattggttccatcttgtctgagccttacagtacaagtggctgacaaggagaagggaagatggagcctccatcttgaacatgtacagtccttagttcctgcccacattcacccatgcaagcacccagcttgtttacctatgtctgcagctcgattttacatgcttgccctttgttagaaaattatttggggctttttactaaaaagaaaaggcttaccgaggactcccatacctttactatctgcctaagtgatttcttcttaactcctgtatcattagcaaggactgaatgtgagcagccgaggggccagaccacacatccagtttgggtgaactggtgccaggacagatgacttacccgcaggatggttattcacaatactttataagcaccaaacaaaaactttttaacgtaactcaggcctctcagtgcttgagctaatcactaaacatgctgatggaggaactcactgaattacacatcctttaggactatttggtaattctttagaacatagcagatgacactatagaataattggctgaatgttttgaagtagcacttgctatgtgaaattataatggctaaagtgcctttttttgactatttatcaagagattaaaaattggaagcaagctgttctttatagagtacatcaaatgttaactttcatagacatgggttttgttttccaaatcatatttttatgaactaaaggcagactttttgcagtcccttttagcacacatttactcttcaaagtaatgttacttggaagtgtaattgtaatgagtttggttatattatgcttctttcctttaaaaaagaacatgattccctgtagggaaattcaggtaatttgcagccacagtaatcttcactatactgaaatgttaaatacttggcttttctccatgtgtttgcctttctgtactctacaagtgctatttcctactcttctaattcaatgctgagcacttgaatgatgttttcttttctccttctactcttcgacttcaggattaagttacagttggaatggttcctttgagacatctctttatttccctcttctcatcctgatcaattcatgagtagttttcaattggtgtgccctttttattgcctgttgctagtatgtcatatatatctcattttaaggactaccgatagaggcttacttaaaatgacagcaaattccagttgaaatgtgttcattttattgagttttacagagtcgtatatatgaaaggtcatcaggttcatgtaaatcatctatgcctgatggtagttgatgctttcttacagattatctgaaccaagcctattagtaatccagtcctctaacaatatgaaaaatataaaaactaaaagatagaatatggttttaaattttctaaattatggatttagatattgccttcccttaaattaatctgtaggcctattaagcagtctctactatcatgcctacagtttatagatatagaaactgaggaacctagaagccagaaaacttccttgtagtctagtacttggtaagtagataagtattagaacccaaatagtctaatttcagactgctctcttagcacagaacatgactcagtatctcactacatgactcataataatattcaaaatgaaaatatttaaatatatagtcccacttgaatttttttttttttttttttttttttttttttttttttttttttttgagacggagtctcgctctgtcgcccaggctggagtgcagtggcgggatctcggctcactgcaagctccgcctcctgggttcacgccattctcctgcctcagcctcccaagtagctgggactgcaggcgcccgccactacgcccggctaattttttgtatttttagtagagacggggtttcaccgttttagccgggatggtctcgatctcctgacctcgtgatccgcccgcctcggcctcccaaagtgctgggattacaggcgtgagccactgcgcccggccgaattttttatattactggaaatttgactgggctttgagctatttatgtcatcgtttttgttataaggctgggaagcctaacccagttgctctgggccacatttctcagtgtaattgcccaagttccaaccttggcctcaccctttccttttctttctttctttttttttttaggcagtctagctactatgtcacccaggctggagcatagtggcaggatctcagctcactgcaacctctgcctcccaggttcaagcaattctccagcatcagcctcccaaacagctgggactacaggcatgcaccaccacgcctggctaatttttgtaggtttttttttttttttttttttttttagtagagacggggtttcactatgttggccaggttggtctcaaactcctgacctcaagtgatccacccgcctcgtcctcccaaagtgctgggactagaggcatgagccaccgtaccaccggtcccggccctttcttatgtctgtgatcataggtactttcctccaactttctgtgccttagcttccttatctgtataatgaacaaataatagcgtgcacagcagaaagttagtgtgggcgttaattatattaacacccatgaagtgcacagaagagggccaactagtagtacatgctcaataaacttttgctagtatgtcatttacataatcttataactaacttccttgaaaataactgcaattctcataaaatatatttagataatgtatagagtccaatgaaaagagaattaaaaacagaccaacaaaaacaaaaacaccctgagttttgtctgttgggtattttttttcttaatttatagtttttgtgctggtgtttgaactacattcttttaacttttttttttcgttttgagcaactacagtgtatacaattatgacttgccaattaaaataatattaattttaataaagagcagctgcaatggtttctaccatttttatgtcttctaaatgctgcttaatcttcagagggaaggcagccattgagtaacttaaatactgttagctctagctcttatgtgatggagaacatagagcttggtattcaggcttgggtcatctatgcactcctcagtccaggtgaagtcaacgctaaataaagtacaaagcctgatagtggacaaatgactggcttatccaaggaaaatgtgagttttgttataaaaagcaggaacagaccctggaaggtaaatatggcagatgtgaagttgcttgacacacattagcaaacatcatttgaaatgagcctaagtattactaccctttgcccacatggtccattaaactggtcagcatggctacatttcagggacagacacagctcttgaggataaagtgccaatgaattagagtaaaactgtcattctccccatattcacttgcagacatgtctcccactctcatcctcctggttcttcaatctttgtctcctttcctcagtgcaccatgttgactcctcttgatttgataatatgtttgaactcctctgacttcttgacgaaggttttctgctcagtgctgagtctgccattcctccttgattctagtaccccagtagcttcaagagaagcaaattccttccaccagccctacccccatatcctgctaggtgaacctatcccatctaatgtaaacacctgtagcaaactcctttgatgcactttcctccctctatcaaaaatccttaaggtgctggatgctctactgctgtaccatgcctaaacacctgccttctcaaattctaggctgtaagtaaaatggagaccactcaacttgcagcagaaaggctttgtcaagaaatgacaatttatatttttatatacattaattttcctttcagctacgattctcattacaaatacgcttaatcctctaatcaaccttagcaaacctctgtgattatgaattttcttttttccctaatgcccatcctaaaattttatttaacagtcactgcatgtctgaaatcagaccagccacgaccacaatgaggaagataactgaggccattgttttgctcagaatattcgagaaaaaaatttaaatatctgtttacttttagctaccatatttacatctggcattcaggaaaaaatctagaatatgtgtattgcccacaaattatattagtttctgttattttattaatattctgcaactaaaaaatatctccaactcaatgaaatcattgctgtggacagggataccgatggaattatgaggaaggacctttttggtcaggtcacatggtgataaacatcgtagcctcatatccctgcaatccttatgggacactatgatgggcatgctcttctttaagcaatatttgttcaacattgaatgcctaaaaatgggcactataggggaaagtgacctcccaaaaagactcgctcagtgatgccatttctactctcaaagggcttatattctaaatggggaaaataagatattcaggtaaaatggtatcacactggtcaagacccctttttgtcggtaaagagaatgaaggggagacattgtcgagctaaacgagtttgccactgcaacctctgagtttcattcttgaatgttcccttccattattttgagctttacattttgtaatcatagcattttccgatgagcttttatcaaacatatgtggcttgggtacggcttagatctttagtcatattcttcatctgtaaatcaggtaaatatcaaaattatgtaaatcctccaaagcaaccaaatggaagattgtaatcaaataagtgcctgcatcttatcactaagttgataaaaaaaatacaaagggctctgaagctaaaccttggagcagctccagctgcagaacattattgctttagcagagaacccagactactgctctcattctaaatggatgagatgggtaattttttcattcgtttaacgaacacacactttgtgcctgtcacaatcctaaggatacagataggcaaaacaaagttgttgttctttcagagcatacatctaaagcaggagacaaatatcaaataagcaagagacacagcaaacatcagagacggttgaaggctctgaaataagaaaattatgtgaggggataaaaagggatgggtggattgtttagataaagtggtcaaaattttttaaaatgtagtatttgaggagaaatctgcataaatagacaaagtgacacattaacatctctgaaggaacagtcattccaccaaaagaacaaaatatgcgaaaatgtagctcaaaatacgtgaaaaaataagcataacaatcattggattcatctgtaacttagttcaattatttaacaaataggctcagtcctgttgttttaaaatactatttttttctcaaagagagctttggcattgtttgaactttcccaagagtcaagagagagatgtcttgtaagcctcaatatcctccttgttgaatgctgctgagctttaaagttgcttctgctagaatgaaatactactttgagtatcctatttcatcttctcttgtctgctagatgctataatgattccccattttacagatcagtagaccaaggcaaagagaagctaagtaactctaacaaggtcaccagccacgcacagagcagcgaaatctaacaatatacaacttctattttagatggattgtcattcttttctccctgaaaacttactgaacaattaccatactgcatcatattctgaatacgaaagaagtaataagcaccatctcttctccaaattagctttaatctatgtgtaaagacaaaatcaacacacctcaaaaaagggcgcattagatacagtgcaaggtttaaaaacaaaagtgttggttagcgttaatatgagttgaatatggcttggggcaagaaaatgttggatctaaccttctttttattttcctgcccgtatttatataagaagcaattgcagagactgggatggttagcctggagaagagaagactcaggggggatttgataactgtctacaaacatttgaagagctgtcatgtggaaaagaaattagatttgttctatatgtccccaggggtgaaagtgatagaaagatttcatcacaatataaggaaggactttcaaacaaaataaggataactctaaggctctctaaagatgtaatgggctctttgagagacggagtgctctgatccgataggcaggacagccttttcaatgacatcttgtatagggaatcaagagaagggtggatggttcacatgaattttaaggtcttttctatggctgagaatttattagtttatcagtgataaatgaaattttgcccaatacttagcctcttatgaggttcagaccttctttaaagagtgttttagagagtactcttaaatgttttggctatcatatctacaactctgcatgttacttctggtacttaattgataataaataatcctcttaaggtgcactttatttcttgcttgctttttctaggtctccagccatacaccaactacagcttcactcttacagcttgtacatctgctgggtgcacttcaagcgagccttttctaggtcagacactgcaggcagctcctgaaggtaatgaaacaatatccatggtttgagggaagaaattttcacatagcattttgaggtggaatctgtaaactccttcataacaaataaggaagaggcaataaagttgataggtacaaaataaaatagcattctaggttcccattcttcaggcttgattcatgtaggtgtagcttcccaaggtcagttcgctttcaattctttaacctttatagagttgattttctgtggaaagaagaattattgaaatttttcaaaaactcagatgttaaatattttgggagcatctaatatataataagcaccatgctcactgctgaagttgtttaaaatgttctctgccctcaagactgacaatcaagtagaagtgataggagaaagatctgtatgaagagagaaaatctgaaagttgatgttaagaaagaacaaatgaatagagtgctaaggttggcctgaagaggaagagatagaaacccatcgatgacatcaaaaaaggctttatggagcagatgacttctgagatggaccacaacaaacaaggattttgacaaatgaacagtgatgtacagagatgtacaaccagacacagttggaaggaatgtaagatggaatcatcaccttagaaggcaaattgcaaatgtctatcacatttaaattgttaatttcccatgatacagctgttctattttcatcatttatgccagaaactgtgccacactgctcaaggaggcatgcaccaggatgtttattgaagcatttattttgtttaatagcaaaatgttgggagcaattttaatgtttgtgagtagaattgctaaataaattcagctattctcatattgtggaattccatgcaccagtataaaagaatgagatgatcagttcatacaaagaggaagttatgacattatattaatttataagaacaaactgagaaaatggcatttattgttaatggttaataaataaatgcatttaaaaatccaggaagtatacacaccaactgatagcaatggttacccatgtgttcagaggtgggatggctggtgtcatttactttcaaaagaaaaatatactcagtggcatgtgttagtgatcaactaattattttgttaatcttcattatctgcctatttttcatatggggaaaccaaggcataaataagtttctaaacagaaatgcaatgttaattaccaccatagactcctgaactacttgtccattactcttctaatgaaatggattgttgtacctcggaatattagacctgaacttcctaccagtaaatggggaataaaatggaaaattccacatatggggcatatggctcctcaccaggaattcactaatgatgttttctatataaagaatgtttcatgtcaaaaagcttagtgttcctttgaaaggaagaaaccagcagtggattttttggaaaggtaaactatcaaatggatactttgatgataatggataatttctaaaggatctatcaaccagatttggctgaaactcaacctgataaaataacagaatctcttgttccatttctctctaccaaattcatatatttaaattcattggaaatatgaaattttcccaacaaaatttcttgaaatgacttacattttatgacttaaaaattgtagctttcaacagtgcagggtaatgtgatatgagaaatgcccttgatttcttttttttttttaactttatgtatctttcctctaacacaaataatcatgcaaagaaataatagatgaaatggactttcctctgcagaagaaacatggatttagggccattttctggctgaataagtgccatttatatataacccatatatgaaataaatatagtgtgaatgcttaacttgggaacaccttagcaatcacattaagttctgttgttttactgtaaagtgaaaacaagtataccactttagattatccacccagacataactaattataaaatgccattttcgaagtacatcagatataatttgaagatctcatatttgagtattttaagtggacatggaaagaattaaaagaagtgtttatgcatagccaacgcaagctgagctcttttcacttgcctctcattttcaatctaagaaaaagtcaatgtacattacaacctcattgacaagttggacacagttctctacagttttatcctcatagaaaactgtgtacctgtacctttagtcaaataacaggaagattttgaattgaattattactctttttttctacaattactgccatccatgtgagttctaattcattttagagataaatcatgcaaaattgcagacatactttcctctagcattgataatgtggaaacagaaaggaaaagaagacccagtctttttcagttcattccagattcctcttcctctgcccttcttttaacgtttacacacccttggttttttcctctactctttacactatagcacccaggctcttctggaattttcgagtactggctttatctcctaatgaaggctgagagctaccaaatactaaagctctcaccaaagctacacttatggatttaaatcctatgtatttactggtctactacatgtttatatttaggtgtttttcaaaaactttaacctcagtacttcgccacttaattcttccactccactctactcctcaacttgcttttcttctctcaaatactaccacctacctatcacctaagcccaaagcttgacactcttgatggctcccttttccatatgtaatacataattttttataaaatctaattagttttaaatcttaagaattttttttaaaaaaattgttcttctttcccgtcccttttaacactgccttagttcagatcctcatagctataagaagagaagttctctggatcctcctaactaggatcccttcctctagtcatttttcctctttctcacatcccacatcctgattctttttcctcttttgacaaaataagaatatgtcatattattcacctccataaagtcccatttccttccaggaagacatacatccatatctccttagcaaagcaacatggacccctcaagttttaacttccatcaatttttcaaggctttccatcttccccacatgccatgcagtgcaccagccatgccaaggtatgtgcagtcctgccatccttgcccacatttctacgactttatgtgggttcccctcagcctgaactccctttccctacatcctcactcagttaacgctcaccttttcaaaacttggttcacgcatctccccttctggaaatcttccactacaaccacctacttcctacccatctccacttctccccacagtctgtgtcaggttaccctttctaagtgttctaacagctactgtgcctccttctcttaaagcatgtatcatactggagtacaactttttatcgactcatctttattcaccatgatacatgaactccatgaaggataagaaaaagtctttatcttcccatccacagtgcccaacacagaaaatgacacaaagtcgggtagaatgttgagtgaataaattaacaaatactaaattgtccagaattcagtgcatccctgacatcagctaatacaaaatttgttcctatcaccagatttcaggagaaaaacaatccacaataaatgctgggaattttgaattggaatgaagatttgtagggacatgagaagtgggtaatatggcatgcaactcaagataaatttaaaacaaatacagtagacatgttctacttgttgtcactgtgtaaaaaggcccaccaaggtttaattctacctttccccttttaaccttgcagctagtttaccccaccccatcctcctaggttacttccctccctactattcatttctttcacttgaactgcctcagtttgctcccttattatatagaataggtttttctggtttcacctgagacttaggccagagttacatggtgaaggggacaaattccccacctcggactcattaatatatctcaccaaagattgtcttactctagcaaagatttcttgcagctgccaagataacgatgtccccatatcaccatccaagtaaaaatgcagcactttctagttatatatacatttgaactccatattatcaatcaaaccaatgggcatggagttattaccaacttgaaaagagcttttgccagccggtataaataataaactcaacttttacctaaaggttgaaacaaacccaaaattatgtttcattttattttattagctcctccacatccacaggctttattgactggttcaaatcagaaaccaagcaatagccattctagtaccttggtgatttttaatacatcgttcaaggtgaaaaagatataactgcaggaagcagattatgaattaagattttatactttatcttttgaatcaacaaattaatatcacatttaaatcaaaactctgattggttgaatcatctagcagctgttggcagagaaacccacatacaaatgtgtactatgatttgtgaattttaccaaatatctagaacagagcagactctcagaacaaaatgaactactttcttctcaggaatatattgctccttagaaagttgggatgtttgagacatttttgaaatctatcttgtttctttcaggatgctgctaaataaattgcattttgttcttctgaaaatttttcttctaaaagtgtcaaaatcttaacctgtacggagtaacttacacaggagatacaatcaagcaaaagctattgattacagggaacctaatattgaaatgagttttttttaatctccagaagagatttacagtgtctaatcagagtataactagatgacaacataaagtggtaggactgaactttctcactgctggcttctccatcgatggatttgtacatctataagagtacttgaatgtttgacattgaattacagttgtttgtgtgtatattttattttttagacagaagtataaactccttgaaagtgagccacatcttagtcatctttgcattccctagaactgcctgcagtgcttagcataacattttgcaggagatatatttacaataaatctactcattaaacatgtattaggcattgtgttatccatagagatacattgacgaataagacagagaagatccctgctaccatggaactaactttgcatcaaagtaagagaaaggagaggactgcaccatcatataatgtaaaaataatagtatgtcaaagaaagaatttgattatgatgtcttgagtgttaagaaggaaatagaaaaggccatgcgatacagagaaactaggttgggactccattagatggggttcaagttagagttaagagagtgctaaaatgaggccttatcaataaggtgatagttacacaagtaactgaactatgagaacatatgagaacattctacatataagaacaattctacatatgagaacaaaatgcaaaaatgtcatgctgtaagggaacaaaggtgttccaggccaaaggaaccgaagttcaaaagcccaggtgtaggaaataactagaagcattctagggatagaaaggaatctggtatggccacagctctgtgaatggtgcaaagaatgctgccacttaggccagagccaataaaatgtgggaccatatgggtcacaaaaagaaattgggattatattatatgaataaattcaaaagggttatatggttcataaagatgacactggcttacatattcactttatacacttttacaaagattccaatggaatatggaaggccaagatttcgacatggaggcaagtttagaagctatgacaggagtttatgagagagagaaacgtggcttggaccaggagaagtgaaagtaaagatacaggaaagtatacattatagaatcttctgggctttatgttagattacatttgggcgtatgaaaggtgaaagtctcagggatcattatttttgtgtgttttgtccaagaaaatggatagatggacaagattgggaggtacatagattgtagacaggaaaaacaagagttctgttttgcatgtttttagtttttgatatatcatcagtcatccaaatggaggtgtcaagcaaacagttggattcttgagtctcacactcagagtttcaatctagagatatgcctttgggggtcttcagcatatgcatatttaaaacccatactgaatgaagatcacctgggaagccggtgttggaagagaagagaagagagaaaaagaagaagagaaaggaagagagaaaagcagaggggagagagagaacagagcatactgctctgaggcattacatcctttcaaggtccaggaggggaagagatcccagtaaatgaggccagaggcatagccagagaggaaaagagaagcatcacactgatgtgcaagaagaagggaaagtgcactcatttgttgaattgtataattcaggtacatactcgattatgcttactttcacatattccaggtaaattgtattaaaaagtttgaaatccccagatgatctctcaggccttgatttaaaatactctcagagtgacaaccaaggcagagaaattatccactgctagttgtctgacattcactttccaaaggcaattcaaaaataaaataatcaaagtaataaaaatatatttacaccaattatgtatttttgttccatacagttagatattttttaaaatcaacagaaaaaatatcacagttcatgggggggatggtgtgacttttgatacactgtttattttctcctaacaataaaacctcattgcgttattcttgccaggagtttgggtgacacctcgacacattatcatcaattctacaacagtggaattatattggagtctgccagaaaagcccaatggcctcgtttctcaatatcaattgagtcgtaatggaaacttgcttttcctgggtggcagtgaggagcagaatttcactgataaaaacctggagcccaatagcaggtaaactaaaagaaaactttaccaatcatacagcaggatttgtacatttctctgggttgataagaaatgcatgtcccactgaaagttgttaaattgtttaattaacttcctcattcattggccattcaataactgatgaaagtgctaaatcattcagtctttagacttcacgaaatttcttaaaaatataaataattcgtcttctgtttgacataaaagcatgagaatttttaaatatacaaaatacatgaagtattaaactttaaaaattaccaaattatcttcaaaaacacgcatccttgaactagcaataaaagagatgtaaagagttttgttttccgtcaactctcttttcttcttgtacagtgtttctctacttgctacaccacatatagttgtgaatagttttagaggaaaaagttccacatatttgcatttcattcccattcatttctcagcagagacaaaaacatatcttaaatcaacagatgttttactgtagaaagtagagatcaatttcattttattgtaaggaatagcagatcaatttaaaaacatctttctctaaacatatttccctgaactccaacctatttaaaaatggggaagattaatttgaatcctccacaatccaccagcacactccaagactttcctgaaatcttcaagaaaagctatgaattactagcaggttaaaaataaatttaagagcagctgaaattacaatggcttggagacaatgttgcctgtgcaagaaaaactaccaagtcaagtttctggaaagggggcaaagagtttgcaatttgtcacaaatttaggactaagcaattgatacaaaaactagtaatcattgttcaagtctcttgtgcatggccttaccacaattcttctttctttttaaatatagatacacttacaagttagaagtcaaaactggaggtggcagcagtgctagtgatgattacattgttcaaacacctatgtcaacaccagaagaaatctatcctccatataatatcacagtaattgggccttattctatatttgtagcttggataccaccaggtaaaaaaaaaaaagaagtatgtgtgtgtgtgtgtaaacattttaaaggaattaattagagataagaatagaactgttaatttagtaaatcagaaagacatagtcggtctcctggataaatatgaacagaaaaatctaaaccacacttctaagtgtatagacgcatgagtacatacatacatacgtagagatataggtatctagatgtcgatgtagatatgtaagtatatacagctttctatgaaagcaacactttcaagtacaagagactaaaaatctttttactcatctattttttttttttttttgagacggagtttcactcttgttgcccaggctggggtgcaatggcgcaatctcagctcaccacaacctccgactcctgggttcaaacaaatctcctgcctcaggctcctgagtagctgggattacaagcatatgccaccatgcccggctaattttgtattgtttttagtagagacagtgtttctccatgttggtcaggctggtctcgaactccagacctcaggtaattcacccgcctcagcctcccaaagtgctgggattacaggcatgagccaccacgcccggcttactcttctatatatccaatgcaagtcatataggtcagaattaccttgaacattcatttccatgggactccttagattggatcattgacattataccattccttttatattaaatcagtgaatggggagtttggaaagacagttgttcacttcacccatgtaccttgggttgtgaccacttatggtagctgcatttttcctctgtaagctgaatagccttcattgagccatttagtcattattgggttgccttgtgacttagtgcaacattatattttgaggtaagcaccatcctcaggtaaaatcctgactgcattaatactgtggagtaaagagtagagtgagaaaggacatatggaggacttttctttccaagtaaaatttaaaaatggttaagatgttaaaaacacttcaaaattatgtgactttatttttaatatctagtcttaagatgaaattgtgacacgccctttttgtcgccatcagaataagtttagccacagttcaaagtggcaccaaatggttaacagccatttgagccatcggtagatccattccataacataattaacataagcctatttttattgaattgaacagtcaaaacaggtactattgtatagctataaagagagcgtaaagacctaatacataaaacttaagtttcttatagaccaacaccttctgctataatctaagatcaaagagaaaaagttattttcccctaaaattcaaaagaaagtttacaaagagctttataagcaaagaaaaatataagttgctctaagatattaaatgtacatgatttcacccacttttgtttaaaataaatgtgcagcatattaaacaaaatataaaggaataattagtagtggcagaatgcatcacaaagtgctataatctttatgttgtaagagcatagatattcttgaactctgttcttaatttcgatagaggaaaagacatatcttctgctgtgggaaatatataaatttacagccccctttacagaatttatttctacttttgtttaattttatttatttatttatttatttatttgtttgtttgtttgtttgtttattttgagaccgggtctctctctctgtcacccaggctggagtgcagtggtgcaatctcagctcacagcaacctccgcctcccaggttcaagcctcagcctccaaagtagctgggactacaggcacacaccaccatgcctggctaatttttgtatttttagtagaaatggggcttcaccatgctggccaggctcgtctcgaactcctgacttcatgatccgcccaccttggcctcccaaagtgctgggattacgggcatgagccactgcacctggccacgattttttagtatatttctccttggcatttttattgtgctgttgtgtttttgcaccacaaaataaaatgaagctggatagagccaatctaataccatatttagcctattgacaagaaagttttagatttagaccagggtcttctacaatccaaattctccaagagcaatacgggaaatttcagggtgatgagcaaggttgatgatttctttgccatatgactgggaagtcccatggtttatcaaaatatctgttattttaacattatttaacatatcagttgccattgctaatctgaagacttcatgttcagtacgaatttgaaaatatctttattttatgactatgcaagtaagagaaatgaaaaagcctggattcatatcccaatactgccacctattagctgaacttaaacggtctctaggcctcaattttctccatctgtgaagtggagataatgatgatacctacatgtaggcaggtagggttgctgtaaagatcaaatgaagtaatttatatgataaatatattatctagttctatataatattctatagataccaatggtgattgtttgaagaattatttttttatctttaattgctcatttttaaaacgtatttgttccaacatttgctgggtctcaaagccccaattttcaaaataataaaaccacctactgaggattggattagtaaattttcaagacctctttcaaatttcccagcgtgtcatttttttctttgaattcaatatcacacttaaatgtttaatgtatcatgtttccatttagaaatgtatcattgtggaataaaacacaactttcacttgtttaatatgaccttaactctcacatacctcaggctttgtataaattgttcattctggtccagcctaggggatattgtagaatgctttacacactaactctgaccatttaaccaatggttaataaatctataatattcagacctgtcaatcttatagtttaagatgcacagaatccatttcagaaaccatataatataaggaaagattaaaatcttcaattaaatctttttcctggtgtctagaaggatttcaaactcagtaaacagtcagatgattttgacttgtgtataatctacagttgattttattggaaagtacctcatgctgtgttttgatttggataataaaaacatgtttctattcctgaatagtcacaaatatatatattttaaacagaaagaaaataaatttgtaagtggagattgtttatttgctcacaatataaagagttttctaggtattcatcatactccctgccattacaaaatgactacatcacagacagagctgaataatgggcaaaacagtccatgcctgcagttcccaaacctgaatgagcattagaatcacctaggaagcttgtgtaaagacagattctcaaccccaaatttactgaataagaatctcctgggatggagtcaagaaatctagagctttttaaaaactccacatatgactttgatgtgctaccaagtgtttttgaaatagtagcccagaggaccaaggaacagatctaggtattgctgaaaccaaatgattctgggagaacaatgtttgactgggtgtgtagtggcgtgccaagactagaagagttaattgtggaaaatggcaagccgctgaagggaaaacagccacgtgacagcaatgatctctgcagcatgaagaaactagtaactagaaagctttacctacccatccaaaaatctaaaaggaatagatgtgatttaccaaaaacatggatcacactcaccaagtgagactggtgaattacaataactgttttctctgaaaacatgagtccgccagtttctcttgaatgtctaaagcaagcttatccaacctaaagcccaggatggctttgaatgccacccaacataaattcaaaaactttcttgggatctttgcaattatttgttttagctcatcagctattgttagtgttagtgtgttttatatgtggcccaagacaattaatcttctttcattgtggcccagggaagccaaaagattggacactcatggtctaaagccaaaatactggctaaattgtatttgtttttttaaatatgcatttttttttttgtggtcagtgtgaacagagtaaccttagacaggtaagctgctgggaaaaaaaatgtctatgtggttacttggcaactgaaaaattacctaagcaattaactgaattttcagttttcaaactattgttctaatgctataaataaactaagccttagtacatgtttataagtcctactagtgaaagggtaaggtctagggaatagtgacaatacccaggggaagagtacccgtgatactgataacaaatgtcgtgtacatacgttcatattacttggtgtatttgccatttgttaaattcctactatatgccaaacactgataagctccttctctgccttacctcagttaatttttatgcaaacgctagaagacaggtaataatatcattatccccatcttaagataagaaattcgaatctcaaaaaagtaatataatatgctcaaggtcacactgcagagccaggattcaaattcaggtctactgtctgctactgccttttaagaccagttcctttctgtctttggcttaacccttaaatccaaatcgacttttcatttcttgaccaaagtctctcagatttatgatggatcaactatgatgtttgaaatagtagcccagagggccaagaaacagagctgggtgttggtgaaaaccaaatgattctgggagaatatttttttttaattttttttcttttattatactttaagttttagggtacatgtgcacaacgtgcaggtttgttacatatgtatacatgtgccatgttggtgtgctgcacccattaactcgtcatttaacattaggtatatctcctaatgctatccctcccctctcccccaaccccacaacaggccccggtatgtgatgttccccttcctgtgtccatgtgttctcattgttcaattcccacctatgagtgagaacatgtggtgtttggttttttgtccttgtgatagtttgccgagaatgatggtttccaccttcatctgtgtccccacaaaggacatgaactcatcattttttatggctgcatagtattccatggtgtatatgtgccacattttcttaatcctgtctatcattgttggacatttgggttggttccaagtctttgctattgtgaatagtgccgcaataaacatacatgtgcgtgtgtctttatagcagcatgatttataatcctttgggtatatacccagtaatgggatggctgggtcaaatggtatttctagttcaagatccctgaggaatcgccacactgacttccacaatggttgaactagtttacagtcccaccaacagtgtaaaagtgttcctatttctccacatcctctccagcacctgttgtttcctgactttttaatgattgccattctaactggtgtgagatggtatctcattgtggttttgacttgcatttctctgatggccagtgatggtgagcattttttcatgtgtcttttggctgcataaatgtcttcttttgagaagtgtctgttcatatccttctcccactttttgatggggctgtttgtttttttcttgtaaatttgtttgagttcattgtagattctagatattagccctttgtcagatgagtagaatgcaaaaattttcttccattctgtaggttgcctgttcactctgatggtagtttcttttgcagtgcagaagctctttagtttaattagatcccatttgtcaattttacctaggcaataccattcaggacataggtatgggcaaggacttcatgtctaaaacaccaaaagcaatgggagaataatattttactgggggcatcaaaaccagaagaattatttgtggaagtggtgagcccctgaagggaaaatatccacattgcaacaatgactttttgcagcgtgaaggaagtagtaaccagaaagctttacctacacattctagaaggaatagacgtgacttaaaaccagattccaggtgtaggaagattttagttaggtgggaggggaggagagtcacttctcaaattgctgtaaagagatcatccaaattctattttaaagccttggtaaatattcccctgtctcccatgtaaaccttcatccactttaccttattctttcttgataaatgtcagtagtaacattaccaaaacactctaagctctagaaaatcaagatctctagccttttgtgtatcatttgaacctctaaatcaggtgacatacaaacaacatatccttataaaaattttgctgaattaatggaggaacacaatggtgagcgagcctccacaatttattatgcagtcaaatgtaaattgtggatatcctgccatttaaaattactcaaacatttgattttctcttaaagtcatccttcgtctacattaacttaatcttaaacagagacatacacacaaagagagagagaggcagagagacagagagagagagacatttcttctttaatgacaaacagagcacatacacatattttccaaagactgcatcttgtcttatggatgtgcaattttttcacctttcagaaaaggtggtattgttttctaacatggaatgggcttcactatttagttgtcctctggccttgggcaagctgcacaatgtttctcaaattcaggtttctcatctgtacaaggagaaattaaatgcctaccttatattgttatatgaagtaaatgagatggcatggtaaaactccattattgtttgaacctttaggtaatgtaaacaaccttagattattcctaagcattccctctcaccttttaccagctctcaacattgggtcaggacttttgtattcatattaaagagaacatttatattaaagagagcaaaggatatatgttaccttaataggtgaaaaattatggaaaattaaatagcaaatgcttcatggaacataagtggtttactcagaatgacaatggagatagatatccctgctgtttaagaatctaaacattcaaaattatttaaactctgaaggtaataatgagtctttctaatttatcgagatgatgactatattttgaactgttctagcccttaatcatgttctaattaacaatgccattgcatttaacacatactttttctcactaaggatggtgagtcatttaggtttaacgtacaatatagaaatactggtgcttttcctttaacattaatatcttactccattaaagaaggaattagcaagaattctactgataaataatttttattaatattgctctagaaatacaaatttttttatttatcattttgattaaaggttagctggccataatatggtctatttatggacattagacatcttggcattcagttaactcatcagctgcagtgtattatttcagatactatgcatttaaagtcaaaatttacattaatctttctaaaggattcacattacattaattgggatgattcaacattgacagttgtttcacttttcttaacttataaatgcaataaccaaatgacaaggagtggtgagtttcagaagaaaatgtgaaactcacttcagtggtttgtattttattttggatattttaaaatgtatctttcattactgagctttaatatatgctaggcattttgctaagagattaacatatatctcatttagtgttcataataacttaatatagtatgtcctattgttttgctcattttactaatgaaaaaggtcaatttagacactccaagctattttctctaggttattcttcaagcaggtgtcagagcagggctgaccctcatgggtgtgagtccaagtctgactcaaaactactattctatattttctcaatatttttccacctaaacgtgcggaaagcaaatgatttttcatgagttctactgtaatcccatttaaaagctaaaaaactgatttttgctttatatataggaagtatgaatgaggacaatgtaattcaggatcagtcgacccagtaacccaatagaataattttatttgtggctcaaaacttcatgagatgtaattcatttgcctttgggtatattgattcctctagtcatttaactaacgtggaaattatttctgagccccactcaggggcaaaacatgatgctggacaccctaaaagttacaaagaggaatgagacactgtccctcttgtcaggaaccctaccatctagtaaggtagaaaagacataaatgataactattatacaaccaatgttaaatttccatacaattggtatgaatgagttcaagagggtcccgttttacttctgttcccccaaaaaggcctaatcaaggtttccctacctatacagtggagaatttagctcgatttgttaaaagcaccatgttaagtgcaaccaagtgttttgaaacaaatgcctctatcaaaccgaattaatagtttttcctcttagaatttttcctgttccagctcctaaaaaaagacttaaaaaggattattgattgacttgtcccattgtaaagtatgcacctgctgtgaaatgaagccatggagaaaaatagttgaataatttaacttttttatttgtaaagataatcagggtttttctgattacatcttaacttcataaatgttaaataacctatcagcatctagttgttgtaaattatgaaaaggagcattgcaaggaatattaaccaacgaaatccttgttctttagtgaacaagaaaatgtgttatggcagcttgtcattgtgcgactggtaactttgacaccaaataacaaaactgccatttgcacttagggtaaattggttcacttgagcttccactgctcctcttgctctgacataaatttatgaactcaggaactaaccaagtcgtgtggcttcccagctgactttaacaaatatgcccatttcatttcatttagtcatcagaataccagggggctcagtcatttcagactcattgcagatggtatagggtttgtaggaacaccagagactttcgtgtcacagtcctggaaattatgatagtggagggggcccactttcctaaatgcatgccagtgttttacgtgttcacagcttagaggagcattttctgtttcagcacctcataggtatatgtaaaggacatttatttccaattaatgaagaggtgaaaaatacattttctatgctcatggtttggctagccatgtttaaatctggattaagattatgtttatatttgacatgcggtagaagcacagttttgttccttcatcctctgggagtcctgtcctttttataacagaagttacttcttgaaggatgcaaggcctggaagcagaacagtaggtacagactgaagacataaagtaaaacaacctcagatgaattggagggaacgccactccaaattactgctaacaatgaataatacagtattttcgtaggaatgcaatttgatcatatccaagtacacataaaaaataaaactagataacaaaatagtgttacaaagacattaacttgaatgaatgtaacatttatttgtagttggaatagcaactttatatgaaagatggattcaaaagtgtttgagggcacatggaaacagtgccatagttgttttttgttctttatttcattttgttccattttgtcttgtagagatgtcagccatttattaagtactttctatgttatgggaatatattgaaaggcttacagatattttctaatttaatcctcacaactctctatgaggtagctattagtatcatcattttacacatgaagagacaacatccatagaggttagttaatttgccagtggtcgcttgggaaataagggcagcagaaggatttgatctatctgacaccactctgtggtttgtctagttcaacaagaatgatggcatgtttcttatgaatgtgtgtctgtcaaacttttctgcaagaactgtcctaggaacaaagaagacaggatgaatatgcaatcccaggaggtctgaaaacagagcctgaagcaatcatcattagcttgcagtttctttaaggtcttgctttttatcttaaaaattcatgtaaatttgccattgtattccagtgtttgtcttcatccaaaaaataatatattatacaacttatcatttgggaaaacattttctactaatctcattggctaaagagtgataatgctgttatatttcatgatattaggaagatctaaagaaaactaagcccaataacaggttcaaggtcccggcaattcttcccctcttcattttgtcataaatatgtgggttcaccgtgaggcagaggttgcagtgaaccaagatcatgccactgcactccagcctggtggcaaagcaagacttcgtctcaaaaacaaaacaaaacttgggaggccgaggcgggtggatcatgaggtcaggagatccagaccatcctggctaacaaggtgaaaccccgtctctactaaaaatacaaaaaattagccgggcgcggtggcgggcgcctgtagtcccagctactcgggaggctgaggcaggagaatggcgtgaacccgggaggcggagcttgcagtgagccgagattgcgccactgcagtccgcagtccggcctgggcgacagagcgagactccgtctcaaaaaaaaaaaccaaacaaacaaacaaacaaaaaaaaacaaaaaacctgtggcttcaaacaacagccttttattcctcactgctttactgttatggcagggtaacaatagggagaaatgcccaaaatgtgatatggaatgctttgtcattctaggatactctggatggaaatttctatcagcatatcctcctgctgaaggtcaaattgcaaactgagagggtccccgattccttcttcaatctctcttaccacctcaagcaacaccctccaaaaaatactttttgcggagaggaagaagaaacctgattatattactttttattttacctctggcacagtacttaaatttttctcatccattaatgaactgagtctcaaatggtctctataatcaattctccttatccagctctcaaatttcattttaattattgcagtcttgttgagagcagtaaaaactgccagttttgtcgtggagtggtgaattaggcctcgaagaatagcctttaaataggcctattatgtgtattcaccataccagtaaagagaaaaataaagttattttttaggcatttaatttttgttatgatatcttttcctgtttctttatggagaaaaatagtatagaactctttattacctgaaacaaagtggaagtgtcatgggtcaggccaacttttcatcccatgtctagggtagaaaatccacattgagttcactttaaagcaatagcgagagactaacattacattgtcctttggttacagtatgaacagttatacttgttcagcacactggcacatcagcataaacattttcttgtgtcctacagttggttcattctgtggtgactacagagtcttcaactctacaattggctagcaaaaattctaatcactcaccatacatacaattctctaatcttgaacttttagaaagaaaaattcacacccaatttttgtgaacaaagaaacggggattctgctggttccccttcctcaaacagggaaatcctgtgtttcccaaattttccatatcaaagtgatactccaaaaaaaggcacagtaagtccttaaggtcatgataggttcttggaaactgcaattttgagtcaaaagatatataaggaaaccaattttaccttaggctagttgatataagcaagatttaagttgcaaggaatatttgtggtcacaaaaacgtcaccaaactaaatatcatcaaagaaagaccaaaacacttctaatattaaactgaaataaatatgagctatacatacatttaagaaagattaatagaaacaagtaagatcatttttaacctaagttttggcaagtcagcgagtgacaacagccatagggataaatgtttttgagcagaaattagaagaaattcttcttaccaccatgcactagtaaaaacaatcgcaagtagggcaagctcacagaaggcttttgtacagcattatttattattatgcatctatatgatagtaacacacttaatgaatctttactttacaattattcattcattcattcattttctgacacaccttttccagttcagggttggggtggccagggcctaaccaggcagctcaagaccattccgttacagggcacacacacacacccacactcgctcagactaggaccattcagacacaccaattaatttaatggaaacatctttaggatatgggaaaaatccagagtacccataaagaaaccacgcagacatggggagaatgtgtaaatttcacatagacagtggctccagctgggaatcaatttttttcctcataaatattaatgaaacaatgttgaatgaaacaacattattcgaggacctacggtactatgtttgttcctgtctttgaatatactttgacatgagcccacaaacctccaaagcaggtgtatttcaggttgggatacttggtctgcagaactttaaatttctacctataatatgcttgttccatcagtaatgatttttacttatccatcatttgtttccttgcttcggaatagtctccaagaatggctctgccttactgcacaaattttctcaaacctatcttgtcatttttccccaagttgtcctactctaagactccattatcaaggaaaagcataagtatattgatataagtgttgatatcagatgggcctaagttcaagtccttgcttctccaattaatcagtgtgcaatctggaacaagttatttaacttctctgagttttagttttctcatcttaaaaaatagtaatatttaccatgcagtattgtcttgagggttcgttcattcattcaatcagctaacatttattgagctgctactttgtgctaaagtctaggcagtggaaccacattggagaaaacaaagtcctaatttatacggttgacattctagtagtattaaatgggataatgcgtgttgcctggcataacacagggatgcattgaaatgactcttgtttgtactacttctgcaaacattgtaagactttcaaactggtttccctatgtcttgtctctcatgtttttaagccactattcatttcccaacagtgttatcattctaaaatataggtagactcttattttcttatttatacctgcaaagtctccttgttgctgattatatatgaagcccaaatttctcaaagaattaattgataaaatttagtagtcacttgagttttggagtgaagaaggcaggatccactctaaaagtcttactctaagatttccatcctaggaaaatgggaagatggtattatgacttactgaaagaggaaacctaggaaaaagaacaggtttgggagtggaaaatacagctagttctgttttagaattgttgagatcgtggcctctgaggaatatccatgtagaaatacctagcaggctgttgaaaatacaaagctgtaataccggaaagatagaaagctagagataagagtttaggaatcaatgatagaatgttagtagtttaacctactagaataaatgtaccagatagtttagccatgatgctctaaatttaaaataaacattctcagtctaagctgccaaatttaacgcaatctagcacctttcctgaggaagcaattgatcagtacttctgaagatgatcaatatctccttcagacacctctttttcatctatcctacacaaaatcctgagcatctttggtttgtaccagctcttccactctgtaaatacagaggccacatctataaaaagcaaaaccacatttcattctttagacctcatctctcttaggtcattgagtcctgtgcttcctcagtaatgttatctctagattccactgtttctaaagtaaagatagacttatgtgggtactacagaagtaaataactaaactcataaatgttaaaaactctcagatcaaggagacaatgtaatagaaaatgccattatattcttcattcaaaactcatatcctctccttgaaaaagtatgcctgttgttcatgaccaaataaaacttaacaagcatttaattatataaatagactttgacgaggctaaactgacaagacctactttctttaggaaggaatggtgaaaaatgacaattgttgaacccaaattttcgctgtatttagggccataagtctcactgacagtgaactgtcctggcccaataattaatgcactgggaattctctaggtagaccatgatttggatatttcatgggctatgtcaaggatccatgtcagacaggaggcatacacaatgctctacagaaaaattattgtcacaagcaaaattggtgttgttttctatgaactttaaaagtaagtaaacctagaaaaaatataggacagcataattgccttatatgttttaagtgaaatgtgccttcatttttatttgccaatagagtatatctttaaatagaaatattatgcttttaaaaatagattatgtacatttcttacttttggaatacacaatctaatatttgccaacttaacttttgtgaagcttttaattgctatattaaaaagtaatttacttttctattacaactttttttttttttttggaggcggagtctcactctgtcgcccaggctggagtgcagtggcgtgatctcagctcactgcaacctctgcctcccgggttcaagcgattctcctgcctcagcctcccgagtagctgggattacaggcacacaccactatgcccggctaatttctgtatttttacagggtttcaccatgttggccaggatggtctccatctcctgaccttgtgatcagcccacctcaacctcccaaagtgctgggattacaggcatgagccaccacgcccggcctcaattacaaaattttaaatagacattatttttaaaagacaaacatttgttgcccattctgttttatttatatatatatgtgtgtctatatatatttatttatatatatatgtgtgtctatatatatatacacacacacacacacacacacacacacacatatatatatatatatgtttttaatgttctctctctctctctctctttaaagggatcctcatccccgaaattcctgtggagtacaatgtcttactcaatgatggaagtgtaacacctctggccttctccgttggtcatcatcaatccacccttctggaaaatttgactccattcacacagtatgagataaggatacaagcatgtcaaaatggtgaaagtctttcagacacttggcctgggcttttatgaaaaagtatttcattaaaaaatttcattaaaaaggaatacattctcagtccaaatataaagactaacgtttcacttcttatttgtagtggactgtttacccagaaaaatcacagtctggcatcgagtaaagcattatgcatttctgcacattaaatcataaatatttaaatatattaaaatggtggttttgcaaagtcttgttttataaggccctttgaaagaaaaacacctagctcacataaaggagtctttggtaatataaaacaaaaatgagtattccaaatatttcatagaaaacatatttaccttggccttatttaaattttatccaggaggaggaagtgagaagttatttaagagttgaattacacccaaatgaatcctatatattttatagtgcttccttgaaccctattcatatatacaaactatcaccttgtgtttcatggcttaggctgtggtcagtgaaattttcatgtatctgtgttgtgttaaggaaaagcctcccccatttcctttatcactccaaacggataagtagctaaatgtaaactgtgatttaggaggggagaacagggaatcaagagagctatacatcattttatttatctcttttaaattaagtataaactttaacagatatggatatgttatatatgtgtatatcatatataacatgatatatgtgtatatcatatataacatatgatatatatgatctcatcatatatgttatataacgtataatactcatttgctaaataaagaaaacatgtaacttaccttagtataaaaaacattttgcttcaccttaaagaaatttatcagactcaatgtgtagtggaaactcctgtattgaatgtccttaggaatttctgtttccaaatagtgctagttctcatggagttggttagaattatgagtctgcaattttgctctgctgaactcatcagaaatggctagtcagtttgtccttttttctctaaaaaatagaccatggcatttttgtttgaggggtattgctttctctgatctgtcttcacctgataaacgtgaaaataattttaaattaatgttttcttgactcaagtacaaagtcaacgtctgcatctccgtgtccctgaaactgtgcaatggaggtacaatatccttcaaatagattgttttattcctgtgtgtttgaataatgttcatgagtttaaaatattggcaaaataaaatattattaaaagcatgcaagatgtgtaggtcacacatacacttgtgaaattcaagtgcattatcactttctggttagaatgactataataaactagagaaacttgagttcagacaagtttccttattattccttatttccagacaatatgccttattgtttatgtctatataaatatgtgactaattaatgggttttccaaaaataattttctatttaaatgttcaaatcccataaaaatttatttaaaacacatgtacaagtatatatgcaaaaggacaggttaaaataattttcatgatatcattacccttctgtatgaatatgtagttcttttccttgcttgaaaaataataaagacctcaattttttttttttcaaggaagttgtggagttagcagtaggatgtttgtcaaaacacctgaagcagccccaatggatcttaattctcctgttcttaaggcactggggtcagcttgcatagagattaagtggatgccacctgaaaaaccaaatggaatcatcatcaactactttatttacaggtaagattggctgttactattatttttagttatttaagaatgcgtactgctccaacacagcagaatcaagagcattttatatttccataagagaatgaatgggaattcatgttgtgtttttttttgttttgttttgtatgtttgtttgtttgtttgtagcacctaccagtgaggactaagactggtgctcaaacttttacaaattaaccaaggaaaaaagccataactgccatataacatttttgattgagatctgtttgaaaactgagaccttatagcccacataggcttatatttagtgatggggcagaacagtcctctaaagcaggggttcctaacccccaggccacagagtccgcggcctgttaggaaccgggccacacagcaggtgagtggctggtgagcaagcattaccaccggagcttcacctcctgtcagattagtggtggcattagatactcacaggagtccaaaccctattgtgaactgcgcatgtgggggatctaggttgtgccttccttatcagaatctaatgcctgatgatctgaggtggaataatttcatcttgaaaccgtacaccctaactgcattgccccagtgtgtagaaaaattgtcttccacaaaaccagtccctggtgccaaaaagtttggggaccactgcttaagcagctcactgaccaagaaaacatagtctttccagagaggaaaccagatacaagacaagaattctaatatttctcattaattattatgtagagattaaaaagttttttctcctcctccaaagatggtgcttttcataagcagaaaaaggggctctcctctccagttttccttctgttttaatgagcctccactccactggttagatggtgttatagcaacttgttccatcatgtgcagaatttattaagtgtacctacctaaaataaagaaaagagacaatagggaagagaggaagagaaagattgaggaaaaagagagacaaagagagattgagagagagagagagaaaataatggaagagagagatacactatgaacattttggtttgaaggatattttgctctctgatctagtcttcaccagatcaacatgaacattgctttaaattaatgtattctttaaataaataatgaatgaggaggagaaggagcaggcaaaggaagagaatgagggagagatggagggagggagagaagaagagaaaaaatagagaaagtgaggggaggtgagtagaaagtacaatgcaaagagccaagggggcaaataacctgtcaactgatggcttgctacttaagacagaaaatacaatcattggtagacatacaggacttgcagattgaaaaacccaatcccattctgaaagcaatgtatttcctttagcgtacaaagcagaacacccttcttctcagatcctcataccccgcacctcttcaacatcctttgttagtgtctctagcagcctcaggccttcccttatttggtcctatgccctggaaacttagtgaaacttacttaggctcctcttataactttagatattgaaatcctttgattcacatcagtcttcagtgatgagctaagggcttatagaaaaaaattacgaaaggagaaagtattattgcatttctggttatgtaaatgacattaccaaaaatgaacaagccaaatttcttctcagcaaacattaatttgaagaataatatttctgattcaaaaacacatgaacacgtaaaaatggttaatgtgaatttccattttacgctaagcacattagtgcaggctctaaaatgtccaccctcttgaaatagttttctttcatccacttaatgctaattgcatgagaaaagcacatcaaattcctattcagaataaagggaaatagagtatctgttatagaccaggacgtggcttcactctgttggttttgtaaataaagctcgtgattacagtgcctattccatggcagctatagagagggaaaacaggaaatataatgcagaaagcccgcttcaatgaaaaatactgtaaattgaatttgacagcatttgatggcatctgattattctaatcacagccaaacaatgatataaagagtaatatgaaacagaatgtgttactgcctagcagactcaaaagcaataaaccttcctccaatgtgacacaatcacttcacaatcataattgtagcctgtttgatacctctgagtacagcagaagggcactgactgacatagatacattttgttttttatttaaagtgaaatgaaaatggcgcactggggctccagatacaatcgttatattcacctacataggcatgaatcacttggcagttatttcaactgaagtttaaatgtgcttagacaacaacaatatcaaatttttcttagatagctgcaaaaaataatcagaaatttgtaaggacagaaatagaatggagacacatagttctttttcattctgagactacatagagccctttatatagttatagccaccagcctgcagtatttctgaggaggttatggcatgtaatttcagcttcatcattggccttctctttcttctatcggcaccaaaggaagtacatttagctcaaaccaaagataggatttggcctatgcagatatttttattaacttgcaggaagcccacttgtaaatctcatttgaaattgtttgccactctcttctcaccaagaccctgaatcattttcttttctgtaactgtcctttattttttaaatatttcctctagatattatcctattaaaaaatatctgacctaataaagacagaagatgtttatgacttcaaaaacaaagcaaaataacctaaatattatcctattaaaaagcgtctgccctattaaagatagaagaatgtttataatttcaaaaacgaaacaaaataacctagtaagaacaaactattaatatgattccctctgcttagtttatctgtttaagctattttgttgactatatataagtcacaaaaaaagatttgctacaaaaagttttgtaaagaatagagaccaacatttaagttagtgttttgcaacctgtttattgactgagtatagacaagactgtcttggacatctgcttcctcctctcaatgagtttggctggtatgataatgattcttcagtattccccctttattttatatctgcaaccttgcaaatggcaaaaatctcatcacttacgtctacaaaatccatcaaacacattaaattgagactttacaaaacatgtaataaaataatctcctcccactaggtgctttaattttaatagaaaccaaatttcatggggtttattattctcatgagctttctctttaaataaataaaaagatttgatcaatgtgcactgagaggcaaaactatatacaaacaccctgtaaatgctgtaaaaatagaaacaaatgatggcacttccttctgagtatttagtaagatttaaaggataaaatctgaaataattttgaagactgtatgatatgaaagggttttcaaagcagataagtgaaaacattttataaaatggataattaagctgattgaattaactaagaaaagacgagcattgaatcaaaggcaaaggaattttgatgtaattcaatttgtattgggtggaaagatggatatagatatgaatatttatatagatagatacagacagaagacagacagacagacatctacctatccatacatgtacatatctactgagagagacacaaagatctatgagacctaagcccttttaccaatgatcttcactacagtgggagatataagacaggctaaataaacaaagaaaagagtaaaatatatagtggaaaaacagaaatatttaccagaaaatttagagaataattctgtgtctagaatattcatggaacacttcatcaagttgatgtcattgagactaggacttataaaataaagatttaatgactatttaaattgtaagagaaatacatttgttagaaaaaatgttttaacagtacagaagattactaaggttattattcattcttatgatttactcatggcatatgtaattttcactaatagaagtaacactattaattttaatatattaacattaatgttttctatttgtattttcttcttcatgaaagaattatattgcccatattgttctgcaattttctttgggcattttatatatatgcccacacacatatacacacctaatttcttttaatgactcatcaatattctgttatatggatgtgtatcatatattatttagccagtaccctgatgatggcaagataggtgattttcaagttttcgttaccacagcaattctctaataaatattcttacggtaagtatacagagaattattcttagtactagaagtactgggtcaattaaaattgttgaggatttgtctttactagaccatatgcatttaaaattgttgaggattcctaagttgtcttccaaatatcatatgtaagaatttctaattctgaaatcttttaatacagggtcagtcttccaaatctgtcagctcaatattttcatttgcacatttttgttgttttaattcaagttttgatgattataagtaagattgttcatttacttaaaatatttatcttctatttgggaggggtatgtataatatattataaattcttagactaattttttctactggattatttcttattgtctatattctttccacattaaagaaaatctccctttcatgatcatattaaaaataacacattaattatttcttccagcacttttatggctctactccttatttctaaatatggaattaatattgttattggaaattagataagaattcattttcttaaaaaatgctaactagtttatcaacattatttcataatccactgatttgaaatgtcactcatacaaaattcctatgtgcatcgggttcattttaggactttgtattctgtttcacttgtggtaaatagggattttaacaagtacagcctgatggtgaagacatgataagtgaataaaatcaatagaataagcaaaatttccaacacataagcataggattcaaggaatggtcaggtttatctggagtcattgctattagtaggggacatttagaagatcagcttaatgatagattttagatctaaggagtttaggctttatattcagaggcaatgtgagctgctgaaggtttagggggtaaatagagaagcaatgtaataaagtggaaagagtgtggcatttgtagtcagaagatatggcttccagggcctggctctaacacttactagttatatgaccttaggcaagtcactgtgttccctaattttccatttttacatgaagtgaagatagtaaatataaaagataattagcctcttggaattctgtaagaattaaataatatgtgtggaattactgttaaatgtgaagcatgataaaaatagaaagttatcctagatatgttgtccaaagccatgttttagaaagacaaatccatctggcagttatagatgtacatttaaagtcaatgaaagaggttcatggttataaaagtagcagcttgcataacagtatgcctggtaggattctgttttcctttaaatatatagtatattttttacatatatatgtatataaaaaaatgtctggaatgttaaacaccaaaatagtgctagcagtgcttatctccaaatattaggctatcagtgattcttttaaatacttctgcttttgttcatctgtgttttcttattaatttttatagtcaatacatcatatggtctagtaaagacaaaataataaatttgtgagcccagatgcaaatctatcatcactgtctccgattttcctatttccttctttgtgtgaatatcaccatcactttctgtaataatcaaagtctgatcaagaaagaggaaccacactacttactttaacagaaggaatttaatataaataattagtaagtagttataaatttgttaactaggtaactaaaagcataaaaagagaactctaagatatcatggaggtggcaactacaggaaacagctagcacctttagaactgagggaacaaaggggagttgttagaattattaaaatgtaaatgcatagaggagggtgcctgtgaagctgggactcagacagttgaagaggggtacctgccactggtgcagttgtatggaggaggaaacatgaaattaagttggttttccaaatgtcggaaaaattgcatgctgcaatcacttgctcccaaggtatttctttattgcaacacaagaacagcctaatacagaaaactggcaccaggagtagcgtgttgctatgaagatacctgaaaatgtggaagtgactttggaaatgggtaacgggcagaggttgaaagagttgggagggctcagaagaagacaggaaggtgagggaaaatttggaacttcttagagactggttaaatggttctcaccaaaatgctgatagaaatatggacagtgaagaccagactaatgaagttggagatgcaaataattgagaactagagtaaaggtcacccttgttatgccctagcaaagaactaggttccattacatccatgccccagggatttgtgaaagtgagaacttaagagtaaaaacctagggtactggtggaagaaatttcaaagcaacaaagcagcattcaagactttgcctggctgtttctaacagcctacaatcagatatgggagcaaaggaatgactcaaagttggaacttttatgtaaaagggaagcagagagcaaaagttcagaaaatttgcagcctggccctgtggtagagagagaattcaagcagactgtggagtgaccactttcaagagagactagcatcactgtaaggtagccaagtgttaatatccaagataatagggaaaaggcctagaaggcatttcagagatcttacaggcagcccctctcaacacaagcccagaggcctaggaggaaagaatggttttgagggccaggcccagagccctgctgccctgtgcaggcttgcgaactgttccccacatcctgactactcttgctgcagctgcagctcgaagggcctcagatacatcacaggtaggtgcttcagggggcgtacaccaaacccttggtagctaccatgtagtgttaagttggcagatgcacagaatgcaagcatgaaggaggcttggcagcttccccctagatttcagagaatgtatgagaaagcctgggtgcccaggcagaaggctgccacaggggtgaagcccttacagagaaactctactagggcagtgcagaaggcaagtgtggtgttggagccaccatacagagtctccatcagggcgctgtctgttggagctgtgggaagggggccacttctctctaggtcccagaaaccatggacagcttgtatcctgaaaaaagccatagggattcaactccaatatatgagagcagccacagggtctgcactctgcaaaaccacagggttgaagctacccaaagccttaggagtcagtgcttgcagcagtgtgccctggagtgggacatggagttaatggagactattttggagctttaaggtttaatgtctgtcctaccaggtctcagacttgtgtgggccctataggccctttctgttagccaatttctcccttttgcaatgagaatgtttacccaatacctatatccacattgtatcttggaagtaaataacttgttttgattttataggcttataggtgaaaggagatgagtctccagatgagattttagacttggtacttgagacttggggcttttgagttaatgctgtaatcagttaaaacttcggggaactattgggaggacatgatttcattttgaaatgtgagaaagagatgagatttgggaggccagtggtggaataatatagtttgtatgtttgtcctctctaaatctcatgctaaaaacagattcccaatgttgcagatggggcctagtgggaggtgattgcataatggggtcagatcccttatgaatggtgtagcaccatgcccttagtgataagtgtgttcttgctcagtttgttcatgatgggagatctggttgtttaaatgtctaggactccacccgccccccgcccccccgccacctctctctcttgctcctgctctctgcacgtgatgcacttgctctttcttcaccttccatcatagttgtaagcttcctgagtctctcataagcagatgccagcatcatgctttctgtacgccctgcaggactgtgagccagttaaatccctattctgtataaattagcttacctcaagtatttttgtagcaatgcaaaaggagcctaatacaaattagaaaaaagaggtagcacatagaaggatatgataactcttatttgagagaaaagcaaggaaaagactttctggaaaaagtgatatggggctagaattttaaaagacgagttgtagttagtctatagaaaaaaggagaggccaggtgtggtggctcacacctgtaatcccagcactttgggaggctgaagagggcagatcacaaggtcaggagatcgagaccatcctggctaacacagtgaaaccccgtctctattaaaaatacaaaaaattagccaggcatggtggcaggcacctgtagtcccagccactcgggaggctgaggcaggagaatggcgtgaacctgggaggcggagcttgcagtgagccgagattgccccactgcactccagcctgggcaacagagcaaaaaaaaaaaaaaaaaaaaaaaaaaaagaaagaaaaaaggagaataagaaagaggattgggagggatattgccagagaattagcagataccaaagccatggaaccgtgaaatataatggaatataagaaactatagtcaagcatttgatgataactagaatataaaatgggactagaaatttcagaaaggtgagtccttttgagaatcagcagattaaggataagcataggccattttacatggtaaatctctaaagaatttttaaaaggactgtcttaaaatttttgaaaggtttgtgatgtctcttccctcaacagccaagtctctactcacaccaaaaacttgacgattcaaccttcacaaatcattttgtaaatcacctgtgtttccatttgtcctctcagcaatctagttcagggtctgcatttattcttacgtaaactgttgagatgacctccttgttcaatgccagatgcacatcatctccatgataacttcattcagatcatgcattacattttacccaatgatttttatgttttaatttttataagaattttcagaggtttgttatactctatgaggttattaactccactttacaaaatgaaatagaaactagaggacacagacaggcaagttcacccaaggtcattgaactaagtggcagagccaggacctccaacctatctcctctgactacagatgtttctgattatctatttaaactcagaatatttgtaatattcttcatggaatggggttggcagtttcataacctcaaaattgttatggtgcattgggttctaggattttgttttaattgcttttgaaaataagcagtgacaattgctggaggggagagaaggagtaaggagctcctaaaagcattgtacattgagaccacagaagtgtgactgcctttaaaaatatatggttcctagtttttatacttatttttgttttcctcttagtgttaggcaacattaaattaactctagttggaaaattacattcctgaagtatctcccaaatgagcctgagcaaagaataaccatttggctattcagagagaactgaaaatgtgatttctctaaacacaggctactcaggaggaaacacttccagttaaatgaacaggtgatgcttaaatcttaaataattaggaataattgtggtctactcaaccacttctgctctaaatgtattcagacataaagagagactctgttttttagcagtgcagatgggacatgtacttctccacgatattaatttttcaaggattcaatagcgataagaaatacttaaccaggctgcaccttttaattcttttggtgaataaacttgaggccaacataatactcaatcttttaaatagtatatgtatttaaaaccccacttttaggcaaattttgttaagaatgtcggctttatagaaaccatgactacatctcaatttgggaattcgtgagagtttaataaaaattaattgaattgtcatggaaaggctgaagctagacaaaatagaaaatgttacttccccatagaccatcataggtttgtttgctgtattgtgttcctagcaaacaactttttaaaaatcactgagaagagtccttggctatgagccctgcagttctcattagaatggatctctcccaatgacacacctggtacctgatatctgtagcaagtacaaaggccaaaccctgcaaaccttcactgagtgcagaatctggttcacgcatggtagtgagcaataatgaggtgggctgccgaaccataattgcaggtgactgagaggtgtctatgaagcctctatagcttccagcatgaagcttgtcattgctcatacttaggtcatcgtgatttatcaacttaaggatcatcagattcccaaagccaaagattttacatattctgcctttttgtgaaaggtaactgtcattcactttgtcttaataaccctttacattttgatggagctggttaatctgatatggcagcatgtgaatttttcagcatctgaagagtgtgttaattaaatacttctaacagcctggaaaatattactgtattcatcactctcttctcaactagagagagagctgaaagaggagggtcaatgtcttggttacattctctcccaacctggaatactgccctgataggaaataagagctgatggagaagaggcaaagatgcagggaagtaatgggattccataacttttagcctttcacttgaaaaacatgattgaacacttactgggctcagatgctgggaatatagagatatgccaaccacagttcctccagaactttgctttccatcaaacctgcatcatgtttttacatctggatgagaaaagaactgttccaaatgaagtatcagatatatagggccgtctcaacaactcaccattccatttctcttacttctatatttaatgctatatatatttagtaccaaaagagtatgcatttggccctagtttccctatcaacaaaatctaaagatgagcctaaacaattccatcctcagacagttgaaagaattttggggtcatactctgcattttaccaggttttggggaagacatctaaaaggaatttgacttttgtcctttaaaaatctctaaagcaagccagacatggtggctcatgcctgtaatcccagcactttggaaggccaaggccagaggcttgcttggggaagaccagcctgggcaacatggcaagacctcatctctacaaaaaaattttaaaagttagccaggcctagtagcacacatctgtagtcctagctactcaggagactgaggcaggaggatttcttgagtccaggagtttgaggctgcagttagccatgattgcatcaatgcactccagcctgagtgacagagtgagacccagtctcaaaataaataaataaaacaaaaaaactctaaaacaaattcctattatattacttatcatgttattttcattaatctgcacatagctccatcttctctactcagctacctattcctttaggtaaggggtgtgttcatctttttacccttgtttctaatacaatgatgggcatataacagtgcttaataaagttgttgatgtataagtacaataaatgtagaaaaaacagtggtcttgatgtataagaaaagattgtccatactttgagaggttatggtttaaattatagaagagaaaattcaaatgaagagaaattaagtggcatctaagaagtgaatttaaaatactttgtaaacatcctgggaacaattgcaaaagagcattgtgctgcatgagagaaaataggaactgtggacttcccttcatagttcttcatcatccagtatgccaacctgggctttttcacacagtaattttatggtcctaagagcagcaaaaggatcatcctcaatgtgcaaacacttttgaagtctctgcaatcatcatatttgctactgtcccatgagccaaaaaagtcatatagccaagctcagagtgagtttacgagcatactcgcaaaaggcctggatacaggaagacaaacacattgggaccctagctgcaatccatttatcatagaagggtaaggattcccaataatagcttctactaattccatatcctgtggttccagttgtacaaaaaataaaaccccgatataactgcatgcatacatgcacacacacacagacacatacacacagatctggaaaatatataaaaatgcattaataatgtttaatatatgcttctgtatttttaaaagattttaaatatgtttgttttcttgtattgcatatgtatcttgttattcagcaaaaacatctggaagataataaaatgtgattttggatgaggtttcaccttttgtgctttttatatttcttctgtgttttccatgttttctacaaagcatatgcactcttttataatcagtcaaatacgtgtgtgtgtgtgtgtgtgtgtgtcaactacactttaaaaatgatatggagttaggccactggagtacttctccatctggtttttctttactatgacaccaggaagaaacagctgaaaagttaagttgataacaaattctaaaaaaaatgtttttactccatctacaaactttgttttgaagtgtgcagctgtcactggttgcctgcttggtttcctttcagacgccctgctggcattgaagaggagtctgttttatttgtctggtcagaaggagcccttgaatttatggatgaaggagacaccctgaggcctttcacactctacgaatatcgggtcagagcctgtaactccaagggttcagtggagagtctgtggtcattaacacaaactctggaagctccacctcaagattttccagctccttgggctcaagccacgagtgctcattcagttctgttgaattggacaaagccagaatctcccaatggcattatctcccattaccgtgtggtctaccaggagagacccgacgatcctacatttaacagccctaccgtgcatgctttcacagtgaaggtaagaccctttagaaaagtaacagacatgcagattatctggtgaatacgttgaaattaattttcttgtccaacttctcatttttcttcacttagggcttaaatatatgaaaatctttcacttgtgaaaagttgcaatgtagtcacggggataagatactgaactgagtatgaggagtattggagaccagtttgtagaccacgactaattttgattacctcaaaaccaataaataaattttatttattcataaaattgcctgatttccattttccatatttactaagtgggaatattttttttttgagacaggctctcattctgtcacccaaactggagtggagtggcgtggtctcagctcaccacagcttctgcctcctaggtttaagcaattctcctgcctcagcctcctgagtagctgggattacaggtgcccaccactgcccaactaatttttgtatttttaatagagaggggttttcaccatgttggccaggctagtctcgaactcctgacctcaagtgatctgcctgcctcagcctcccaaagttctgggattacaggcgtaagccactgcgcctggcctaaatggaaataatttagtcttgatttccattttccatgtctactaaatgggaataatgtaatgctttcctccatacctcatagagatgaggttcagatgaaattagacagaatatttaattttctacttccccaacaagctagtataatatatagctatatatatatgtatatgtatatatgtatgtgtatacatgtttgtgtatatatgtatttgtatatatgtgtgtatgtatgtgtgtgtatatatgtatttatgtatatatttaaatatacacacacacacatacacaaagttgcatacactatggcttactggtgatttttttcagggatggcttcctctggcccatagaacgacttaattcagttcacctgagcacttagtagctcctgagtgctttctttatgtccagcataacctcatggtctatggaatatacagaaacaggatggtccttgtcacagggagtgttccgttttataatattgcagagatgagaattgcacataaggggaaaagaatgagaagcagttgagtacagcctataatgtccactacactgagacttagatcccgaactccactatctactagctttaaaccacagtacaagagagagtaacatcatataccaagtgttaggcaagaaatgctctgggagatcaactctcaaactgaagatgcttcatggataagattaaattttgtggtcttgggagtgaaatacaaatatgtgccaagaccttattaaatatggaaaaccctcaataagaacaaataaacagacaaactaaagcatttataaaaaaaccaaaaaactatgtttctatgctttaaatcctggaaggccaatttacatgaaggttatcttatggaggataacatttatcaaaatatttaaattacagtgagcaaatatattttcattaaactccagaagagcccttttaaattaatagtttaaagtacaatgttttcccactgtcctcatgtttaattttctcatatgactaaaaaataagcaatatgtaaatgaaaggataattgttttatcttcatttttatctgtttcagaattagtactatatttttattagatagtaaattatgtactagagtcttttatattatgtcttctagttcctatatgataagcattagaagcagtgttcttaagtgtaaaagatactttttagtggatatgtgatccaggaggaagttcgttacttcccaccatatccttcaaactcatgttctaaactttcacccttaaagtaaaacgtttatgagtatactgaaacacccttgttaatagctttctgaatgaggcaccttaatttaaatatgtttttattgaaggcatcaggattataatgattaaacctctgatcttttaaaatacaactttcaggggtaggagcctaataatcatttagtctcacgaaacagttctattggaattcccttgtggaataaccctgtaagtcatcccttcataaccagcttcattttaaaacacaagatttaaagtatatgatgaatccatgaactctgttctttatttaatcttctaggctctatttttatcacactaaaaagcttctgaaaagaggcaagtgtatggccccaagctttaagcggcacagggctctttgcacatgggccctccctgatgtggctttcattttgacagtccagtactggtgtgcttttctatttttccaaagattttttttcttgcaatgtcgaatagattagccagaataattttaaaaacaatacttctgtgtcctatttttgaatgtgtatgtgtgtattcaaagtggcctcccaaaacctaaatctttggctcttagaatttcaagagaaggcttcattagatacaccaagaaaggtcccacctgatcttttcaagcaaacaaggacatcttccacaaagcaatctaggcaagtgttcagaccttctggccactggaccacgttttcagggcatcagggcaactatgactctttatgatctgacacctttgaaggaagtcatcaggaaaatgaactagtgtttttgtgtttcacttattcccacagtccctgtgtaggagattgtgttcaatatttttgtttaaaagatatctaggccagacgcagtggctcatgcctgtgatcccagcactttgggaagctgaggcgggcagatcacaaggtcaggagttccagaccagcctggccaacatggtgaaaccttgtctgtactaaaaacactatttttagtatttttactatttgagaggctgaggcaggagaattgcttgaacccaggaggccacggttgcagtgagccaagatcatgccaccacactccaacctgggcaacagagcaagactccgtctcaaaaaaaagtaaaggaagttctattacttatccagggttctatactcctcaccgtcacagaagaatgtttcttttatctcagacaaatcctgcctcctataatttaagtctatctccctttgttcagagcagcatgacttctccataatagcacaaaggggcttcagggtccaacaaattattgacaattcaatctgatttggcaaataaccattgagtactatattcaatatgtcaatattgaataccaaacttaactatgttgttgaagtctactgtgagacttggcccttgagcagagcagagactgtgaggaagaatgagtgattcgttctgaggcacaggctattactgttgggcattttgggtttttaagcttcttgcagctgcgtttctgctgcccatgtttagaagaccccatttcatttttatttttgtataaacttaatgggtccaagtgaagttttgttacctggatatattgtgaagcagtgaaatctgggcttttagtgtaaccgtcgcacaaataatgtacatcgtacccatcaggtcatttctcatccctcaccctgctccctccctccctcccacccttccgagtctccagtgtctattattccacaccctatgtccacatgtatatattatgtagtcctacttataagtgagaacgtgcggtatttgactgtctgtgtctgagttacttcatgaggataatggcctctagttccatccatgttgctgcaaaagacatgatttcattcttttttatggctgagtagtattctacagtgtgtgtgtttgtgtgtgtgtgtgtgtgtgtgtgtgtgtttcacattctatatatatccatatatataattacattctatggtgtgtaaaattattcctatttagtaaatatggaaagtggaaatggaaatcaggagatatatagatatagatatagatgatatagatatagatatagatatagatatcacattctgtttatgcaatcatccattgatgaacacttaggttgattcaatatctttgctattgtgaatagtgccgtaatacacatacgaatgcaggtatcttttttaatataatgatttattttcctttgggtagatgcccagtagtgagactgctggattgaacggtaattctacttttagttctttgagaaatctctatattgttgtatattgagaaatctctataggggttgtagaagactccattttaaatcgcatcccaagtacttccctagatctacttactgtttatctaatttctgcaccaggtaaacaactttactgtcttctttcctttctgtgcctgctgtaggaaatttttcaagtttttgtttattggccactctggctaaaattcttcagggcaaaggaactacagaaccttctccattaatgaggcacagagtccatccccacaactgtaggattgcagttcagtccacaaactcgcaagaggtactgctaatgcattagtcccttgtttattaagatctcatctctgcccaaggggccatcaataaattgcccatgttgtggtgccatcactagcttgccccaaggtccccccagagttgtttatagacaggtggatgttgctgagagagccacataaaacaggtgcaatggaggcatgaattctgcttgtggtggcagtggatggagaactggcagtgggggccctccgtgggggtgagaagcgtatgtgttggcaggaacagcagcagcggcagcagcagcagaggcagcaggagcagagaaatggaaagagtgtgggttttaatgcatcactagctgctctcccaacctcatgaaaagtttcacctccctactcatctctatgtaggtctttctaaggaagaaagagggagatcaagattcttggggtctctttagaccaataccttccattattgaaaacagctttaattagaaggccttaaactcccttcccaattagctctgtgatgaattgtgcggtgtcaggaaagaaactgtatttagccttgcttggcatgcaggagttccatggtggtatttacagggaacactcctggcaaggttggcgatattgctaccaccatttgggtttgtttgctttttctcactggcatctgccattgtgctggcagaaataaatctgataatttgggattttaaagaaaaaggtggtttacctattatctgtgccctaactatatccttgcttgttccacggggttataaaacgtcaagcccagatcatgcatttgcccagtatcctaaaagataaatggtacttcactctgtgtagaatcaagcataaggtgctgagaaataagcaaattatatgggtcactaaaaattggcttccaatctgggaataaaatccagaattactaactctagtttctagattctagttgccaggcttcctttcccaatgtcaaggaggaggtagtcaaaatttcctcaagggtttgtttcctatatctttaccattaagtagatatgtggcaaaaataataacaataataataaaatagatatttcacaattgccatgttatgaagagtgtgtgagtaaattgataaatttatttttaatcccattttcattttggcttagataacataaaatattactgctctttacatatgatcttaaattagtttcaactctttttaatttgatgattcttagccttttctccccagacacatttattagacaacagaaatactctgggagatgtagctttctaaaaggactcctttggtgactatctttctaatgtgaagaaaaattcagtaataaaaataattatcatatttcctgggtcggttctataaactgagattttcacattttataataagaaataactgtgtcattcttctatataaaagatagaaaacatgggtgagtaaatatcacacaaaacaatgaatatttgtcggcctaaccctttttttttttttttttaaagagacagggtcttgctctgtcacacaggctgcagtgcagtggcaccatcatagctcactgcagccttgatgtcctgcactgaagtgatcctccctcctcagcctcccaagtagctgggactataggtgcatgccaccatgcccagctaattttttaaattttttgtagagattgtgtctcactaaattgccccagctggtctcaaattcccggcctcaagagatcctcccgctgcggcgtcccaaagtgttggaattacaggcttgagccactgaccatggcaaaactttttagttgtgatgatattttagctttaatatcaacttttcatttacttgccttacataatctttaacccttttgtctaatttgggctagacaaattagactttcagacaaatatgtatttgtctgaaagtcataaatacatataaagaatctaccttttgctcaacattattggggatgaaaaccatgtaagtcttttgaaatttatgtaattacatctttgaaagagccatatttttctccaaccactttatcccagcaagctccatcaggattcccttgctcacccatcagtaacatctaaggcaggtcccatgattttccagtcacttttcagtggcaaggatcaacgcaactggtgattaagactcattccaagtgttttttaaaaacttcagtctagactgggggcgatggctcatgcctgtaatctcagcactttgggaggccgaggtgggtggattacctgaggtcaggcgttcgagaccagcctggccaacgtggtgaaatcctgtctctagtaaaaatacaaaaattagccaagcatggtggctggtgcctgtaattccagccactctggaggctgaggcaggggaatttcttggacccgggaggtggaggctgcagagagccgagattgcaccattgcattccagcctgggtgacagggcaagaacctgtctcaaaaaacaacaacaacaacaacaaaaactccagtctaaattaaaacctgatatgtgcttaaggatctgcagtggggaaagagggcatggtcattttcctctttcttcagttccctcttctcttatttatttccccaggatcatggcatgaaaagaaagaattagacaaaaaggaacagagctttactcaataatattgctctaattaatcttctattaattttgagggggcagatgcctcatgggattttctctgtgggttatataggggtccccataggaaattccatgcctcatagtcctctgatgcaggcaatacactctctggctaatttcttactatttgttattgtccaagaggtccaccctacaacctttttttgcctctgggggcccttctcccaagcaggcagccaatatcaagtcctatcacgttgacaaaactcattcctttcttggcacccactaggattgcagaaaactttggtttcaccaaataatgaaggtacagcttgtccagtactatattctctgcttgacctatcatgctggatgaaacctagccagtctcctaactttggaattcattgactaagacacaggtattagcttctgtgctagcctattatcccaaaactatgggatcacttaaggatttcagaagacccttttgactctagtcattgcatcaaaattgtcctatgaatttcatcagtgcagtaggaagcctcttgccaagaccagactgttcatctcacttttctggcaacactcccaatttcttcaagagcttctcttggatattccttgcatgccttgaaaggggagtgtggagaaatcccattccctccctgaagtgggaaagatataaccaaagcctctttcttctccactgaatccccttctttaattttttttatgaacttggatcttctcatataggttgtctacatagatcttcataggaagatggatcttgaagtctgttttttccataagtcatgcagtgatatgtctagctgttccagtagagttacttaccacctatttttctaaatcatactcattattctccaatacagttctgtttcacatcctattatataactaaatggccctatcatctttctagttgcacaagccagatcatttttgagtcctctctcttccttacttccatatcaattcttcactaagtgctattgattctatttccaaaccatatcttaaatccttccacttgaagacaacattaggatcttcacacatgttaatccctcctcctggaatgatggctcattctcctataattcatctgtcctcattcttactcatcaagtctgaactaaaatgttgcttatctcatagggctgctgcaatgactaataaattaatgtatatgcaaagtactgtaaagggcaatataaatagactataaacctttagcagtccttctttttgaaaaaacagagactggaataaattagcaaatgtagataaggttctggtttgtctaggcaactgtactaatttggtcatgagtgaaaaaccttatgttttatacattttaagtgttcctcaccttgcaataaaattctgagcttgcaaatttacatgtttcctgataccacattgttaatttccctgtaattttccaaatactggattaggttctatttcctttctaaactgcctgaagcaagaacatgctttttttttttttttttttttgtctcctgaggtttattacggtcttatccctggcccccctgccccaacaacatcacatacctgccagtctaagagccctcctcaggagatttccaccctatatgtagttctctttacctgacatgacactcttaggaccctaccctttcccttagatctgggattatatcagcagaacatgatgaggtattttagtcacacacacacacagacacacactctcacacttctcaaatcatacaaatggattctgccaaattggcatctacctacttcccctatgccaaatagtagtttatcagtacatgagggacagttagttggtggggagactgtttgacctgtgagtcaagtatgttgctattttctggcctttaaccaacttacaaggaaaccctctttagacacctaagactcccgtggagccttgtcaaaaatgtctgtgaaagtaaaatgaactagtccacatactaacaggcccaggccataaattcagaatatatgccatttagcagagacagcaagctgtaaatggcagtgaagggcagaagttaattgaactactctgctcttgtcacagatggaaagtagccactacctgagacaagatggctgccccgaagtaccctattacagccaagagatcatatccttagctctgcaagggcttatgggtgagggggaaatcatacacagatgaccaatttttttatggttcacagccgataaaagtgaaattcagcagctgttcaggacaagtgaccactgtaacagctgtaatataacctactaaatagagagggaattgcattagagcaagaggttagctgtgatcatcggcaggtgagtgctttattgaagttgaaagaccattaacattgatagagtaattatttcaacttgaaagtaattaccttgatgggtgataacttctctagtgttcccagatttgattgggccaaacaattgtgagctcctgaagcctagaaaaatattacaacaatactgtgatttttaaattactgaaaccactgttggaatattctaattatgccgaacagtgaaaagattttgccttacacaagctagtgacctctcatgtagagagagacatttgctttttaatccaaatgcaatgacccacacccaccacctgtgaatacatatgtgatgggtttgcaaatgaatctttttatctcaatataatttttaaggtgaaacatcttgttagtgctgtgcctgggtaatagtaagctagaactgctgacatttttgatcatatctatggacttgaagtctccagaatggcaactatcttctatctttgtcacagagggtttaaatttgtataaattaaatattttgataatgactacacataaattagaatttctggatgccacgtactttggatcccaaatttcagatattatctagttacataatcagttgtttaaataactttctcgcctgatgttatgcaactccactacaaacactccattgtcagggtattttccgtttacctacactggacatcagcaaacaaaattaaagttgaaaacctgggctattgcttctctgtagtctcatgaatatatgaaaattgcaagttatttgcaattgagggccaagacacatcaaatctaattcagtgatcaagaccaagaaatacagggctcttccattaatcagtttttcaccatatttctcttttgagaatctacttggtccagaagctataacagatacaaacaaacgagaaatagtcttttctctctgaaactcgtcgtgtatttggagaaacaataagaaaagagacaaaatacaatgtaataagcaatcattttgtcatgcatggtattgattgtacttataaatagttacaagaacctaggaagactctagcccatactcctgaatccaaacccagcactcattctatggaaccacaaaccattgacagaaaaaacacaggcatcatgattcttagtcatgttgtcagaaaagatgaatgtgacatcaccttaaagttcctggatgattccgtagacctttctatcatcttggcagggtttgatcagatgatcagccaatgaatgactatctttttggcggcacttcccaggagttttttctaatcaaaatctcagactctcctagggacaaaacaggtttctacttgttgtctaagagccaataaggaatgttttaccaagcagttaatgggtttctttcatctctccatctcggctctgaattcccctccatagacaaagtctttgggtctctgtttcagaaattaccgtagggtagaaatctctgccaagccagaagacatttgcccactggaaagtaatgtaactggcttgaatttggtaaaagagtgaaggtttgagacaaaaacataccacttgggaaagtgataaaaatttatgaattgaattgtaaatcttgccattaagccaaccaaagagtaacaaaatctgaccaatctgacagcacatcagagttcttagcacagcaggctcaccatgtgtcatatacagccaggctaaagattgtattaaggacccccttaggtactctgaatttaaaataagtgtaataactcatttttaaacattttatatgatacttgaattattaaatattcacattacaaaatcagagaattttaatccattcaaaagggtgggttgtctaacactgaaagataatggtcatgtctagatagtaaaattacagtatatttttaacggatgtacatgttactttttgacaagacacaagtagtgaattttatcgtacaaattcctattgggtgattatgatacagagttttatttttgctaaagcaattactaatgtcatggctggatacctgtgcccattagtggctggttctgtgtttttttaggatggttattgatctcttgctgagctgagattcaggttttatgccagatagcttgattaatgggttggtttctataagtggactgaatggggatagaaagcaggggcagcctgctctgccaaccccaaatccgtcaagacgcatagctcattatgaaacagttatcaaggatacatgaaaaattaattgggctcagtttgattctgaaaagaatcggctttctacttggcgggcccccccgccccccttccactctttccagatgttctgcaccagcccctagagaaacagcaaagggagacgtattaatacattgtattgattagatcaagacccctgacagttatttgtagagataccatctggctgctgttcgaattccttcaccaaaaacaggacgtgacatgttattaatctcaactctctaagtatagacagttgccttttctgctaaaccgcattttaccattccgtaggagatggaggaagacctgaagggtgcagaaattaaggttattacacaaattgagccatatggtccaaatatttcagcaagaaaattgccaggcaataaaaattgctcctgccttcctaatggtgtaaattacagtttaaccatggctctaatgatgtccttctgccgcgcttaactactgttacatgaaggacattgttttaaaaatataaaaaacaagtaaatgccagcagcgtgttttacaatctgttagtgtgtcattaagaacactgtcagaattacataaacataatggcaggcaacccagcatacaaaggaactcgtatggaaatagaaagtgtcttgaaaactctcttcattatctctgaaatgtcaagagcactgtcccctctggaagttttctagggagaaaagacctgtccatctagtgctttattctaattctcatgtgtgtcccaacagcagtgttttctaaatcaagtgtcacaacccatagtgagactaagtacacatctggtaccacaaccctgtccatatacaaaaaatgaagcagacaaggtgaggagacagctaatgaattctaaacaaaatgatagacgttgaccttttgaagtatttttgtttttggggaaaacagttaagactccactatcttccttgatgatgacatcaacaattaaaagtataatttctatcctcagcaaactaacctggcaacagaaaaccaaataccacatgttctcacttgtaagtgggagctgaacaatgagaacacatggacacagggaggggaacaacccacactggggcctattaggggggtgaggggaggaagagcatcaggataagtagctaatgcatgtggggcttaatacctaggtgatgggttaataggtgcagcaaaccaccatggcacacgtttacctatgtaacaaacctgcacatcctgcacgtgtatcccggaactttaaattaaattttaaaagtataatttctgtcatccctatttggggcatgatattaagaggaagcttacttaagataatcaaaaatctttgggaattacaataaagaccattaatatttgagtaagacttgaacccttcaaatatttttagacctattacaccaaaaacacctcggcacttaaaaattccatataggtcatattgatgttttattctctaaaactgcacaatcctccaagctttttggtcttctaagatgttataaacacagtttgttaaaggaaaagtccagataaacgtttgtagaaaaatttgaagggaaaactacttttaattcccagaggagagttgccttatctttaagccctttttccttctccatttccccaaagggagaaagaccaggatataaattgccctttaaactaaaaaagaaaaaagagagggaaaaaacctaggaaaccaaaaaattattctttttgcatgcatgcattaatattaatgagaacccattaagttattatttcctcatggcacaaatggcaaggctagcaatctattgactagagcatcttctgcctggaaagctcttacccaggtgtccccatggttggctcccacactttcttctggtcttaagtgaaaagttactaccactaaagccttacctggcctactcagctacaatttcactccactctccctcacacacactttctattcctcttctgtctttatttttctctttaatatttagcttttatttctggtttcttgctaacctgtaatcatatttcagaaattgtttttcaaatgctttgttatgcttcttatttcacctaaaaggaaatctgtatgttcacagctaaatcaaactgagaaagcatcatttatatgttccaatttcaatttataagctgacaacttccacataaaacatattatgggcactttacacatgccatcttatttcacctcaataaccaatctgtggagtattattacctaaatttattaatgaggaaatggaaactcagagaggttaagtagcatacccaaggtcacacagctagctgcagagtttggatttgattgcagctctctcagcttctaaagccttttctttctgttatccagtattgcttcttgagtttcagcctagtggaacaagatgttatttatgaaaagctaaacatcaatgaaagccacaaattatagttcaataggacaaagagatgacacagagcttgatatgattcattgcctagtataaatatagaaaacaattgataaaagtttcaaagaattaaaagatcacttggactggaaaagttcagagaaggcttttgggagaggtctgtgctttgaacaatgggtgaaattcaaatagaagaaaagtagaacagatattaccttattcaggcaaagaaacagaagcctggttttgaaacatctgatggcaagtctctgcttcaggaggtcacatggggaatatttttccaatatgcccccattaattgggctgatattaaaacaactgatttaaaaaaaaaatcaaaatactcccaagagatgcctagcaaagctattgagtgaggtggttagcagcatgggtctggggtcaggaaacatagattagagactggctttggcttttttactcattgtatgccttcaggaggttatgcctaatagtgcctcccgcagagaggcagcacctcttagagtcgcaggaactgagacggcactcagtaaatagtggtgagtaagattcaaaataggttttcagagaagaaatcagcacatgaagatatcatggtgtcatagtgtgttgacagggtcctgtctggagatactagtccagaatttcaaaaaaaggaaaagttttcttctggccgggcgctgtggctcatgcctgtaatcccagcactttgggaagccgaggtgggcagatcacctgaggtcgggagtttgagatcagcctggccaacatggcaaaaccccatctctactaaaaatacacaaattagccgggcatggtggtgggcacctgtaatcccagcaacttgggaggctgaggcagggagaattgcttgaacccaggaggtggaggttgcagtgagccgagatctgccactgcactccagcctgggtgacagagcaagactccaaaaaaaaataaaagaaagaacaaaagaaaagaaagacaggaaggaaggaaggaaaatttattatattttcttgtttcccctgcattccctaatacccctttcccaaaagtatggatttcttcactaaatatgttagtagcagaatggtcttgtggcagttgacccaagactccaggtagagcagtggggaaagaaaagacaaggccagccaagaggccagccaagaggacaagctcctccaaaggttgacttgagatattaaactcattgaaaaagttactcaacatccacagtgttctggtggtacctcacttagtcctggacaatgaatcacagcccaagcttcatcattgaattggtgacactgccgagggccaactcaccagccttcaaaaacgacagtgctgctgacagcaaaggcgatgaggacacacatgtgcatccacccttgagatgctaaaagaggcaggaaagaacttgagggaaagaacaaatcactcttctgagattgtcctataaactttataccaggacctatgctatcatcctccttacctaatcatgtttaatatctgatttataagaatctaaatgtgtacctaaaagtagctttctaaatattactgggccacattaaactgtgaccaattttcttccttcctggcctaccacattttagaaatatgatagcatatttgggttgggagtcgctaaaggcctcaagagagtccatctctttgtcctttctgactaggaagacctggtcatcacgccacaagccttggtgtctcgtttttaacagagcaataattatttattagtggaatatatgcttattatatccagaaattaaagttgttaggggacatttgtgtatccaggtccctgtggctgggtgatcgcatctgttagaaataaatcactttaagaaaattatattagccccacagacagtcaagaatggagcaaagggagggaagtgtgaatagggtgaggaagcttgattttaaatcttgtgaaatagagtgtggtcaatatgttgtcagcacattacagtgtgcagacatcaactccatttttcccctctttgaacctcaggtggccaattaacagtatatgctatttattcattacaaaacaggcaggacaaattgaatggttagaatgactaataagaattcttagcaaggagtaaaataaaaaatgatacataaggagagaccccccagaaaaactttagggatttccagaaaaaaaagtcttgaggagttttcctgttaaatgtatctagaatttctactgacatgaggaaattaaaatggaaagattctctttgaatacattttcttcctaaaatatgttctcttcaattccctcatttgtatttccttagagtttcattccttcctaaagcagaaagacagttttaaattacttctagcaattataagtatcattagggtgttttgatgctgcatttttacaacaagcactgtgcttgccttccttatttgtctctcagttcaactccaagtcgcaacacaggaaatgaaaaccttgtaaattgacttgatcttatgaatactcacttttgcaaatatgaaagaacttaagaagggattataaaatactccttatctatataattaaaattcagttgaaatatatgaattcaatattttaattcatgcatttcattttgcgggcattcaaagattatatgcttctatatgtctgccattgatttctgtaaataacattatctctcttattgcaaaacgtacatcagaagaagttggaagaaagcgagggcttgagggatgttaaactgaagcagcagtgacttactatgcagtgttagtagattgcttgccttgaggatctagaagccgatagaagaaatggagccagcaaataagaaatttcttatttcttattccagaaataagaaattctgaacttttaccttcaaagatccaaaaagaacatgctaatgttcttttttttctaacttttgagtaatttagtcattctcgttcagaaaattaagggtctacatctggcagcaactgaaataaatggctcaattgagtacacacttgaatgtcaaatatatcactttaaaagtcaatatttgtttcagctgtaaatgtttctgaacggaaatgatgcttttagtgtctgtagtctaaggagtagttttatttttgaaccctcaaattgagtgctccacctagagccgtaggaccctttcctttccatgaggagagcgccctctactgggtatgtttacttaccacgcatgactgttaagaccctgagctaaacgtatgagcagttgagatgtacataagaaagagtttttggaaaatctttgcccctgcttgtactagaatgattgcaagtgtggaagtagccatagttcactgtagttttctttttactgctgtattattgcaccctgttgggggatacatctgagcatttcatgtgtcctacttttaaaatgcccagatggtggctacgtgctttggtttgaattgggcagccctcatctttcatgctctgtagtctgcctcgttatcagagagacatgagacaaggaaaattcttccatttttcagctcctcttcatctgtttctagtcacccacagtgaatgatgcacttgcacaattgttaaaatgacagtcactgtgataactgaacatcacttccctgggatggggagttccctatgtacccatagcttcttgattccttcccaatacagcacctttttcagtgtaactgatcacttgcaatcttgtaagtaacacagcagtgagaggcagtgtaaatattttataccttgccccaatcacttgtatgtgcatcggtcttcttcactctagcctttaagcttaacagagattttaaatcaaatcattcaaccctagaaatagtcaaaagaattaataaaataaatgaaacagtgtaactggttaaaatagccccagtgcacaatacaggtttagtatgattttgtgacatacacattttatagggcttttgtctccaactacattcttcaaagagccatctgggcaatgaccataggtatcatttttaccaataatagtcagcacttcccactgggaaattagtcaagggaatgagtttttttttttttttttttttttttacaaattatcttcaagcatctatcttccaaaaagtattactggactttgtccattacaaggcaacaacctaagtgagttacttgtgctcttattttagaactttattcatcagatcattgtgatcaaactcaatttcattttcaaagaggaaaaagattttgctctgtttttcttcttaataataggtttgctgaaggaagaacattaatacaggtcagcgatctccaaactttttagaatattcacttgtagaaataataatttggggagcacacatctgcataatatgtatatttacttatttgtaaattataaaatatgtactagttaaatagtatcatttacactatagaaatagacatttttaaaggagtggaaatagataaaattatcaagaaaatattttattatgagcaactactatcaataatacctcaaggcacaatacacactgaaagattaatcattaatgatgctgaatgtcaatctctttcctgagtgttcttgatcatttcaaaattttgttgacacttctgatcaaatacaattggaccattcatgtttatacctcatgctgtggttgataaggagcttgaaggaaggagaatcagactggccatttatttgttcttcatttatgtttgtattgttagtgttatatttgaatcataaatttgaattctaggaattttgaaagccattcatgtttccaaagttagtatacttaaaaccagataatataatccataaacccccttagcatagaaccataaactacaatatgtcacttgacacaaggggtccagaaccccggggacgcagaccagtactggtctgtggcctgttgggaaccaagccacacagcaggaggtaagtggagggtgagcctcaccacctgagctccacctcttgctgtgctccacctgaggagtggagcacagatctgctccacagatcagctgtggcaattgcttctcacatagcaaaccctattatgaactgcgcacgcaagggatctaagttgtgtgctccttatgagaatctaactaatacctgatgatctgaggtggaacagtttcatcctaaaaccatccccacctcccccttccatggaaaaattgtcttccatgaaacggatccctggtgcccaaaaggttggggatcactgctttgcactaaaagcaaacaaatagatgaatattgttagctcctcgctgtaaaactcccattcttccttttccaaggacagatacagaacttaattgattcattcattcactcatccagtcagtatgtgtatgcatctaatatatgccaactgggtatatgacagtgaataaaccagacaaaaatgcttccctcttgaagctcttactctagtggggagataaagacaataaacaagataaggaaataaaatatatacataccatacataagctaagggcaatggaggaaaataaagcagattccagagtctccattataaaaaatacaacttttgcaaattggtctttagttcttattgagtttaaaaggatgtttcccttccacatccttcttcccactgtcttctgggatttttgcttcagatatgatggtcaaattgcttattataaattcccttctaagattctatgagttttaaatttgttttaattgttcacatgttgcattgaatgatgcaattgtactcttctagcacacagagctagtaaatttcctatatattgatatttaaagcctgtccttttatggagtattttgtgaccacctaaacccatgatgatttcttgtgtatacaccttcagtgcttggttcccatgtatttctctagtggtttcagaaaggtgagttttacattcctaatggattacagttcctaaaatccagtatgttcatactttctacttttattcctttccatttagtgcctagaaccatgccagaaaaagacataatttgactgtggatttaaccctcagatcacaaaccaatctcagagctttatttttttgctgagagttttaaataaactataaagtcaaatttaaacaattatcctttggaatcaacagaaccccacatttccttagctttccttagctgttcctattcccaaggatcacattcagagcactcttcttgagtgacagtgatgtgccaggtacttcacagaggtcatctgttttaattgtcacaaaagcccaagagaaagatactaactgttagaaatctagctcagaaaaagtagatgatttacctaaggtacatctagtgtgagtgacaatcagaacttaaactcaattcttctaagttgactgctgttttgattaaagcgcctgggctctcagaagtggactcttcctgggtgttagtcacaagggcttctcagaatttttctcctacatatgagacagcagatcatttctgcctctctgctaagataagccaagcaaaataatagattgtagaacaattaataatgcattcaaaatgccaaactcagcacactttctatcctttgtgaaaaattttgttcccattttgtccaaatgtctaataaaaatgattgtggaaaaataaaaacaatctttgatctgcctaaatgaaaataagaaccacaacttctagctctcagaacaaatcaaagttgtttttatttttaattaagtatgctaagcttaagtacattttctcttaaggtgtaattactaaaccatgatgatttctttttgtttattcatttaaaacacaaataaaagcagataatcaatagatcataatctaaaactagaggatttacaagttaataagcttgagtcaatagatattccataacaaagctttcaatgctgaacctgacataatttgctttgcactaagctggttgacttaatgctttaatttaattccaatattaactgaaaaatccaaagaaaaggggaaaatttaaatcctattatactgaaatatgttcaaagcaacaactcaatatcctgccacaactgcttaagtgtgccaccaaatgtctgcttaatcacctggtttctgattggtgataaccagttaacccgtttggagcctggtacaagtgaattgtggaagtttctcagtggtccattcatgcaatagcttttatcttagcctcaacagtcatcatattttcatctcataatgtctacttttcctgacttatggccaaattattggagttgtttttatttgaaaagcaatttctccttgtctcttgagattaccatccagcctgacctcccaaaaagcagaacagtaggcaggcctaggtcaaagaacagaagaaagcctttcttagttccctgaaaggaagatgtaagaagctatctgtatgaagaaatagcattagatggcatccatcatgcaaagtctggtagtactagtagaggtagtgagagggatgtgaggcaatatccagcataccttcaaggttatgagcacagactcaaaagacaggatccccccaggcaaatcctggttcttccccttacaattatatgaccatggacaatgtgcttcgactctcttttcatccatttccttatctgaaaaatgagggtcataatagtgtctatctcataaggttgttttaaggcttacacaatttaatatacataaagtacttgaaaagcactcattgttatcatcctttgagatactcttgaggcataaggaacttatgctaagaataattttgagaacagcagcatcagtcactgaatatagtagtcagatgtgtctttcagaagagttatgtgtgcacggccaaagtcctaaatattccatttgttaccatccttaaaatatcatttgtgaatttgtaactggtttttgctttgtgtcattgctggtcgactgcagtcagggtggcagtgttttggctgccccctaccatctttagttttctggtcccattagtgttgtgaccaagaacaagttagtgccctttgctcaagtaaatgggctagaagttaagcactgaccttttaccataggggacccttttctattctgaaagagaacttagaaaacagaacagaaatctcattgatttttacaatgcacattttttcatatttctccgtctctgaaattgcatgcatctaacaatcttataatcactgtagatggcagttgttacatacttgtcatttcctgtgcctgcacaaactctcgtcacttcacttgagttctgtgcaccgttggtacgacacacacattgagtttaattgccacttaaaatggcttcaaaaaatcatactatgatttggcattaaaataaaaagtatacacaaaaggcacagaaacagtcacttcatataaaacttaaaaagaaaaaacaaactatgcccatgcaagtctaaagaagtctttcaataagtataaaatacacatctaagtgataaaggaatcactgtgttcttgttgaattagcagcatatttttctctttcttagggatacataaaatagtttttaaaaaaataacagtgtgtttaaatagatgaaatcctggaccccaaaaataggtgtgttttataataaatatttttaaaacagctagcatattgccaataagataatgtatttaaataaaagataatttattcattccgcagacatctatagagcacccatatggtgccaaacatattttgtatccctagtccctgtcctctaagagttcaaggtctagtggggagaaaaggcaggtaaatagatcaatctaatataaaaatgccataaacagcagaaagaacagagaagagagacaagtaactcagtctggggagtcaagacactcttccaaatggagatgacattaaatttgtattttcaaggatggaaatacatcctttccaggcatagaagggcattctaagaaaagaggaaatcatgaacaaaagcgcagcctcattgaagagtgtgttgtaactgggtctgagtcatgagtctagggacagggtgtgaatgaaagaggcagaccagggagaggctaaggatgtgcccaaagagacaggctgcaggagattttgctggtaagggctggcaatcaaaaccaccctgcttcctaaccaggtctaggctctggcatcactctgacttttaaattaggaaagttagagcttgattcttgcacttgactctgtcaatgcattaggatctaggagagatggtaagtgatgttggaaagcagtccaaagttcataagcagttagctatttccatccaaggatgccatgatttcctctcctgaaactaagtgaacagccatgggtaaaaatgaactgaaggcagaacatgggcctctcatgtaaaagcagaagtaggggattcccaggcaagatggccaaatagaaacagctccagtctgcagctcccagtgagaccaacacagaaggtgggtgatttctgcatttccaactgagatacccggttcatcccactgggactggttggacagtgggtgcagcccatggaaggcgcagaagcagggtggggcgtcgcctcacccgggaagtgcaaggggtcggggaactccctcccctagccaaaggaagccttgagggactgtgccatgaacgactgtgctatctggcccagatactacacttttcctacagtcgtcacaacccacagaccaggagattccctcaggtgcctacaccaccagggccctgggtttcaagcacaaaaccaggcagctgtttgggcagacactgaggtagctgcaggagtttttttttccataccccagtggcacctggaaccccagcaagacagaactgtccactcccctgaaaagggggctgaagccagggagccgtgtggtcttgctcagtggatcccacccccatggagcccagcaagctaagacctactggcttgacattcttgctgccagtacagcagtctgaagtcaacctaggatgcttgaccttggttcggggagggatgtccaccattatggaggcttgagtaggtggttttcccctcacagtgtgaacaaagccaccaggaagtttggactgggcagatcccaccacagcaccgcaaagccgctgtagccagactgcctctctagatttctcctctctaggcagggcatctctgaaagaaaggcagcagccccagtcaggaacttagagaaaaactcccatctccctgggacagagcacctgagggaagggctggctgtgggtgcaacttcagcagacttaaacgttcctgcctgctggctctgaagagagcagcagatttcctagcacagcacttgagctccgctaagggacagactgcctcctcaagtgcgtccctgacccctgtgtcttctgaaagggagacccatcccagaaggagttcatagacatctcatacaggagagctccagctggcatccggcaggtgcccctctgggacaaagcttccagaggaaggagcaggcagcagtctttgatgttctgcagcctccactggtgatacccaggcaaacagggtctggagtggacctccagcaaactccagcagacctgcagaaaagcgccctgactgttaaaaggaaaactaacaaacagaaagcaatagcatcaacatcaacacaaaggaagacaatgaaacaaccccatccgaaggtcaccaatatcaaagataaaggtagataaatccatgaagatgagagtaaaccagcgcaaaaaggctgaaaattccaaaaactggaatgccttatctccaaaggatcacaactcctcgccagcaagggaacaaaactggacggagaatgacttcgacaaactgacagaaataggcttcagaagcaaggtaataacaaactcctccgagcaaaaggagcatgttctaacccaatgcaaggaagctaagaaccttgaaaaaaaaggttacaggaactgctaactagaataaccagtttagagaagaacataaatgatggagcagaaaaacacagcactagaactttgtgaagcatacacaagtatcaatagccaaatcaatcaagcagaagaaaggatatcagagattgaagatcaacttaatggaccagtgcaagaagattagagaaaaaagaatgaaaaggaacaaacaaaggctccaagaaatatggggctatgtgaaaagatcaaacctacatttaattggtgtacctgaaaatggcaaggagaatggaaccaagttggaaaacacacttcaggatattatcaaggagaacttccccaatctagcaagacaggccaacattcaaagtcaggaaatacagagaacactacaaagatactcctcaagaagagcaaccccaagacacgtaatcatcagattcaccaaagttgaaatgatgaaaaaaatgttaagggcagccagagacaaaggtcgggttacctacaaagggaagcccatcagactaacagtggatctgtctgcagaaaacctacaaaccagaagagagtgggggccaatattcaacattcttaacgcaaagaattttcaacccagaatttcatatccagccaaactaagcttcaaaagtgaaggagaaatgaaatattttacagataagcaaatgctgagagattttgtcacaccaccaggcctgcattacaagagcttctgaaggaagcactgagtatggaaaggaaaaacttctaccagccactgcagaaacataccaaaatgtaaagacgatcaacactatcaagaaactgtatcaactagtgggtaaaataaccagctagcatcataatgacagaatcaaattcacacataacaatattaaccttaaatgtaaatgggctaaatgccccaataaaagacacagactggcaaattggataaagagacaagacccatcagtgtgctgtattcaggagaccaacctcacgtgcaaagacacacataggctcaaaacgaagggatggaggaatatttaccaagcaaatggaaagcaaaaaaagcaggggttgcaatcctagtctttgataaaacagactttaaaccaacaaagatcaaaaaagacatagaagggaattacatagtggtaaagggatcaatggaacaagaagagctaactatcctaaatctatatgcacccaatacaggagcacccagattcataaagcaagttcttagagacctgcaaagagacttaaactcccacagaataatagtgagagactttaacaccccactgtcaatattagacagatcaacgagacagaaaattaacatggatattcaggacttgaactcagctctagcagatctaatagacatctaacagacctaatagacatctacagaattctccaccccaaatcaacagaatatactttcttctcagcaccacatcacacttattctaaaactgaccacataattggaagtaaaacactcctcagcaaatgcaaaagaatggaaatcataacagtctctcagaacacagtgcaatcaaattagaactcaggcttaagaaactcactcaaaaccacacaactacatggaaattgaacaacctgctcctgaatgactactgggtgtagaatgaaattaaagcaaaaatacatacgttcattgaaaccaatgagaacaaagatacaacataccagaatctctgggacacagctaaagcagtgtttagagggaaatttatagcaataagtgcccacaagagaaagcaggaaagatctaaaatcaacaccctaacatcacaattaaaagaactagagaagcaagagcaaacaagttcaaaagctaccagaagacaagaaataattaagacgagagcagaactgaagaagatagagacatgaaaaacccttcaaaaaatcgataaatccaggagctggatttttgaaaagattaacaaaataaatagactgctagctagactaataaagaagaaaagagagaagaatcaaatagacacagtgaataatgacaaagggaatatcgctactgatcccacagaaatacaaactaccatcagaggatactataaacacctttacataaataaactagaaaatctagaagaaatggataaattcctggacacatacaccctcccaagactaaaccaggaagaagttgaatctctgaatagaccaataacaagttctgaaattgaggcagtaattaatagactaccaaccaaaaaaagcccaggaccagaaggattcacagccgaattctaccagaggtacaaagaggagctggtacaatttcttctaaaactgttccaaacaatagaaaaagaagaactcctccctaactcattttataaggccagcatcatcctgataccaaaacctggcagagacacgacaaaaaaagaaaatttcacaccaatatccatgatgaacattgatacagatattctcaataaaatactggcaaatcaaatccagcaacacattataaagcttatccaccacgatcgggtcagcttcatccctgggatgcaaggctggttcaatatacctaagtcaataaacataatctatcacaaaaacagaaacaatgacaaaaaccacatgattatctcaatagatgcagaaaaggccttcaataaaattcagcaccccttcatgctaaaaccactcaataaattaggcattgatggaatgtatctcaaaataataagagctatttatgacaaacccacagccaatatcatactgaatgggcaaaagctggaagcattcccttggaaaaccagcacaggacaaggatgccctctctcaccatttctattcaacatggcattgaaacttctggccagggcaatcaggcaagataaagaaataaagcatattcaaataggaagagaggaagtcaaattatctctgtttgcagatgacatgattgtacatttagaaaaccccatcatcttagcccaaaaatgccttaagctgataagcaaattctcaggatacaaaatcaatgtgcaaaaatcacaagcattcctatacaccaataatagaaagagagccaaatcatgagtgaacttccattcacaattgctacaaagaaaacaaaatacctaggaatacaacttacaagggttgtgaaggacctccccaaggagaactacaaaccactgcacaaggaagttaagagaggacacaaacaaatggaaaaatattccatgctcatggataggaagaatcaatatcctgaaaatggccatactgcccaaagtaatttatagattcaatgctaccccatcaagctaccattgactttcttcatgaaattagtaaaaattactttaaatttcatatggaaccaaaaaagagcccatataaccaagacaatcttaagcaaaaagaacaaagctggaggcatcatgctacctaacttcaaactatactacaaggctacagtaaccaaaacagcatagcactggtaccaaaacagatatatagaccaatgaaacagaacagaggcctcagaagtaacaacatacatctacaaccatctgatctttgacaaacctgacaaaaacaagcaatggggaaaggattccctatttaataaacagtgttgggaaaactggctacctatatgcagaaaactgaaactggacccctttcttagaccttatacaaaaattaagatggattaaagatttaaacataagacctaaaaccataaaaaccctagaagaaaacctaggcaataccattcaggacataggcatgggcaaagaccttatgactaaaacaccaaaagcaatggcaacaaaagctaatattgacaaatgggatctgattaaactaaagagcttctgcacagcaaaagaaactatcatcagagtgaaaaggcaatctacagaatgggagaaaatttttgcaacctatccatctgacaaagggctaatatccagaatctacaaggaacttaaacaaatttacaagaaaaaaacaaataacctcatcaaaaagtgggcaaaggatatgaacagacacttttcaaaagaagacatttatgcagccaacaaacatatgaaaaaagcctcatatcactggtaattagagaaatgcaaatcaaaaccacaatgagataccatctcacaccacttggaatggtgataattaaaaagtcaagaaacaacagatgctggagaggatgtgaagaaattggaacacttttacactgttggtgggagtgtaaattagtttaaccattgtggaagacagtgtggtgattcctcaaggatctagacccagaaataccatttgacccagcaatcccattactgggtatatacccaaggcattataaatcattctagtataaagacacatgcacatatttattgtggcactattcacaatatccaagacttggaaccaacccaaatgcccatcaatgatagactggataaagaaaatatggtacatatacaccatggaatactatgcagccataaaaaagaatgagttcatgtcctctgcagggacatggatgaagctggaaaccatcattctcagcaaactaacacagaaacagaaaaccaaacaccacatgttctcactcataagtgggagttgaacaatgagaacatatgggcacagggaggggaacatcacacactggggcctgtcaggggctggggagaaagaggaggggtaacattaggagaaatacctaatgtagatgacgggctgatgggtgcagcaaaccagcatggcacatgtatacctatgtaacaaacctgcatgttctgcacatgtatcccagaacttaaagtgtaattaaaaaataaataaataaaagcctgggtgtggtggatcatgcctgtaatcccagcactttgggagtccgaagtgggcagatcacctgaggttgggagttcaagaccagcctgaccaacatggagaaacgccatctctactaaaaatacaaaattagctgggtgtaatggcacatgcctgtaatcccagatactcgggaggctgaggcaggagaattgcttgaacccgggaggcggagattgcagtgagccgagatcgtgccattgcactccagccaggtcaacaagaacgaaactccatctcaacaaaaaaaatataaataaaaaattttttaaaagcagaagtaggattacagaaagcagagaagcccaaaagatttgaatgttcactgacaaacacagcaataaagtatttgatattgcaggcttcatttgaagtaaagcttcaggaatacctggaaaccaagctacaggtggcactcagctccctaaccagcctttgccaagaggaggggtctttccagagacaaccatagagagtaatctttagccatgttatcgtctaatatcaaaaatagggggcaggccaggtgaggtgactcacacctgtaatcctaacactgtgggaggccgaggcaggcagatctcttgagcttaggagttcaagaccagcctgggcaacatggtaaaactacatctctacaaaaaatacaaaaaaaaaaattagctgggcctggtggcacatgcctgtagtcccagctacttgtgggactgaggtgggagaattgcttgagcccaggaggtcaaggctgcagtgaacagagatcatgccactgcaccccagcctgagtgtcaaagtaagaccctgtctcaaaaaacaaacaaacaaaaaaaaaagagggtgtaatggaagtgttttaatatgaccacggcatcctctcactgagatctgctaccatttattttattttgtttgtttagagacaggtctcactatgtcacccaggctggagtgcagtggctccatcatagctcactgtatccttgacctgggctcaagtgatcctcccaccttggcctcccaaaatgctggttagaggcgtgagccaccatgcccccatttgtaatttaagctgataaatgagagcaggggcacaagtctgtatccgctaactcttcagcaacagctgacccaaggccagcaaacccattgcatagccaacaaccaaccagatcctgtctttctgaagacacacagagacagtagtcagatggttatgactaataaggctgtaaggttgtttagactgacaattggtagccatgctgggcaaaagggaaagaaagaaaattaagagaaagggaaaagagagagaagtgccatgcagcccctgagtgacagagagagaaactcagttctgacagttttccagtttcaaaacccaaacctgtaaagttgacccttgaacaacacaggtttgaacaggtccacttacccatagcttttcttctgcctctgccactcctaagacagcaagagcaattcctcctcttccttctcctccttgacctattcaacaagaaaatggcaaggatgaagacctttatgacctttctcttccttatgattttcttaataactttttctctagcttgctttattgtaagaatgcagtatataatacatataacaaacaaaatatgtgtttgttgacagcttatgttgttggtaaggcttctgttattagtatcctgttagtagttaagttccgggggagtcaaaagctatgtgtaggccaggcacagtgggtcatgcctgtaatcccagcactttgggaggatgagacaggcggatcacctgtggtcagaagttcaagaccagcctggccaacatggggaaaccctgtctctaaaaaaaaaatacaaaaatttgggtgtggtggcacacacctgtaattccagctactaggaggctgaggcaggagaatcccttgaacccaggaggcagaggttgcagtggccaagatcgttccactgtactccagcctgggcaatagagagactctgtctcaaaaaacaaacaaacaaacaaacaaacaaaaacagaaagttatgtgatatgtagacgtttgcctgtgtaggacattggatcccctaacccttgcattgctcagaggtcagctgtagcttctgtacaggcttgggttctatacttgccttttctcttccttacaaaaccaatcaaaatgagtttcttttccctgtaactaaatttccttgactagaatattgattactgccaattcccacctttcctgtaagttgtaagttttagaatctggttgtttttttttattgggaaatacaattgatttttgtatgatcctaaaattgctgaactctataattgtttatttttagattctgtggaccttttaggtagttaataatcatatctcatgcttcaaaacccatgtaccttgtgttagaataagataggataggataggctctggtaacaaataaaattccaaatctcactacctaatgcaataaaagtgggaaagtcaaaggtggatttggctgcccttctccatcttatatcagtgtcagatcatgataggggaagagcatgctgcagagttctgcaagaagcttttaaggtccagacctggaaatagctgacattccttcttctcacatcccattgataagaatgtctcataacctctctatttaggggcagggaaactagcaactgcgaaaaaagtaaaataaatgaatatttggtaaattataataatctctgctgcatagctctttttatttccttatcttacattgcctaggattaccactacaataataaatagaatgcatctgtcttatttgttatattaacaggaagactgctaaagttttatcattaagtatgattttgctatatgagtgctgaatttttctcttgagatgattaaatgtaaaacaacttttctaagggctaaatcctatatggtcattgctctggactgaatgcagttgcccactccctttccaaatccttacaatgaaatcctaaccctcaatgtgatgttattaggaagtggtaaggggacaaacaagtgaagagacagatacactagagtataagatctatcaagtaataaaggtggacctgtgagtaaattcaaaccatttttctctcttgagtagccatgcttatgacaaagaaattttgaatgccttgtgggttgtttgtttgtttgttttgagatggagtctctctctgtcacccaggctggagtgcagtggcgtgatctcggctaaccgtaagctccgcctcccgggttcacgccattctcctgcctcagcctcccgagtagctgggactacaggtgcccgcaaccacgcccgtctaatttttggtatttttagtagaaacggggtttcacagtgttagccgggatggtcttgatctcctgacctcctgatctacccgccttggcctcccaaagtgctgggattacaggtgtgagccaccacgcctggcaagaaattttgaatgtcttgttttcaacaaatagttttaatttaaatcgaaaagagtgtgtaggtatgagttgcgaatttgtaattcatttgcgattctggtattgatggattgtcttatcttgtacaggtcatttgggccctatggactttaggctcaacaacaaaatcagacagttggagtacagtgccagtcacaatttttagactgtttaaccctaaatgtctttctaataggccttatttatatgagaacattttatagttaaccacaaatattttgtctgtgtttatcaagagttacaagcatagcagccctttctttactgaataaaagttcaaacaaattggattcatctttatttggagctgccaattaaagtgggatatagtatagttaagcagtactcaacatgtaggccactaatctcttagggtcccaaacactctttcaggggctctgccagggaaaaactatgttcatactaacagtaagaacttacatgtctttttcaccttcatccccttcatgagggtacactacagtggagttttccagaggctccatgatgtatgaggatgtagtcactctgctggctagtcgtatacatgtctcagtattcttttcctttaaacacttctctactttaattttcaatatggtactattgatcgatataaagatcagaaacaaaagttctttgggatcttcagttgtttttaagaaacaggggtcttgaaatgaaaacactggaactactaatacacttcacaagtacattttacctccacatagcacagaaataaaatcataaccctgtctcttgtcagcagtatgactctaggtaagacatttaacttatctaagcctcaatttccttatgtataacaatacaaatctcctagcttcatgtgaagatgaaatgggatacaccaagtctgacatagtaggagcaaaaactttgctcacaaataatctaccttaggaaggatagacaagaaaatggtaaactggttgggtgcagtggctcatacctgtaatcccaacaatttgggaggccaaggcaggtggattgcttcagcccaggagttcaagaccagcctgggcaacttagtgagaccttgtatccacaaaaaaaaatacatatgtgtgtgtgtgtatatatatatatatatacacatacacacacacacacacacatatatatatatatatacacacacaaaaattagctgggcatggtggcacacacctgtggtgactcaggaggctgaggtgggaggattgtttgagtcttggagacagaggttgccatgagccaagatcatgccacaatactccaacccgggcaacagagtgagactctgtctcaaaaaaaaattaaaaacgaaaagaaaatggtaaataaataacttttgttaccataagggaggagaactaaacaactggggcatgggggaggagatggggaacttttcattgttgctgcacccttcacttagaaggtccagtttatgaaaagtaataatttagttaaaaccttcaaaaatgatttttaaagaatttccctgctcctcatagatatagcctggtagtttacataccacttcattttctatgaagtactgttgttgcaaatttatctatgcaaagagctaagcatgcaatgattgttgctgtgggtataaaatactgctttgctaaggatactgtagctaactcacagttaattggctgaggcctgagcacacccatatcagtttgccatatacagatttttggttaacttgatttccatatgcaaagtgagaagaaagttctaattcatatatatatatatatgtaaaatatctttctctcctgagtcatcaatctctacctcattattgaaaaattgccatcaatataaaaatatactcctggtatctcccattttttaaatatgtgactccacgggcccctccagctaccatctcctgttcctgttcccctttacagtttacagccaaacttctcaaaagaatatattactattccctgtttctacctctacacatctgttctcccttccacccactccaaccaggtttctgtccttatcactccattaaaaggctcatatcaagacgatttgccacgaaatcaagagctcttcctatgcacagcttccttaacatttcagcagcatttgacactgcttaccacacttctttaaaaaataccctcttctctcagtttcaaggagaacacactgtattggttttcttccctttattgtcctggtctcagcttctattactgatttcctttcggctgctgtccaagtcagcctcatcctgcatctgccactgagtttggtcctgagctctctcttctacttgacctacactctctccttagactattcctagactcattcaagtctacttcttagacttcactctacattcgcttcttcaccccagcccttcagcttaaattctgtccatattcactgataatacaaatacttttgaacacttactctagcccagccacaattagaggcatttggggtttagagagaatgaagtagatgcaggcctttgactctgtggagtttacattctggcaaggaaagacagacaacaagcaataatcataaaaaaatatggtatgttagaaggtgatgagtgcttaagaaaataaatcaggataaaaagaatcaaaattgggaggagacagggaggagagtgggtcagttgcagttttaaagaagagtggctcattgagaagatgagctgaagttactcatgcaaacctatgcataaagtgggttgcaggcagagaaaacagccagtacagaggcctcaaggcacgagcttgtttagtatgttttaaaattttcaacaagactagtgtggctgcagtgcagttttcccaggggaaaatgataggagacaatgtcagaaaggaagtggaagggtgggcagaaagaacaggctttgattatgaataacttgaggaactagaacagggttttgagcagaggagtgacatgatctgacttgtgtccaaaatacacttttgctatgtggacaatgaggatttaaggttaaaaataggctaactggctgggcacggtggctcacacctgtaatcccagcactttgggaggccgaggagggcacatcacaaggtcaggagttcgagaccagcctggccaatatgatgaaaccccatctctattaaaaatacataaattagcctggcctgttggtgcttgcctgtagtcccagctactcaggaggatgaggcagaagaatcgcttgaacctgggaggtggaggttgcagtgagccaagaggctgcactccagcctcagtgacagagcgagattccatctaaaaaaagagaaaaaaaggcaaactgaggctactgcagtgctgagagtgggaaagtatggcttggatcagagtggtagtagtagatgtggtgtgaactggtaggattctggatgtatcttgaagttaaataaatccagtcctatttcctaatgagtagagtagatgtgaaaaaaaagagaaaatgaatccaaagtttttggcctaaacaactggaagaatgaagtcgtcatcaactgaaaaaaagggaagactgcaggtgaagcagcttttctaggtacatcagaatcatttcagtcagggagactgaacactatgggttttgagatagaaagtttattattattgttcattagagacagggtcttcttatgttgcccaggctacactcaagcttctgggctcaagcaattcttccaccttagccttccaaatagctgggactgcaggtttgcatcaccacacccagctaaagatgagcgctttctctaggaattagaccttacgcaattgtgggaatagctgggaaagtgaagatttggggaggagagtaagaagatgggtaagggagttgccaccatgcccattcaagaagccaaggatggccagccaccttagtgtccctaccacagatgcctatggagaggtctatggaaagcaactcctctgtttagctaccatctctgtggggccagcactaagtgtcaggtggtagacctgggccactattggttaaagagtcagcagctggaaagaagagtcagattggagtagaggagaatgaggacaatctggaacccacttgcacctctgtgtctattcatcttcacatctaacttcaaccaacttcgaagagtaatggccactgatttactttcattctccaaattgtatgtaaatgtatctttaatccagaactagatagagaagatatattactgctatatataacaaagtacaacaaacttagtagcttaaaaacaatttctacttgttatctcacagttcccctttgtcaagagtctcaggccttttgttcgaggtctcataaggctacaattagggtgtctgttgggctgtgttctcatccggaggtttgaatggagaaacatttacttccaatctcattcaagttgttagcagagttcatttctcttgtgtgggaatgagagggaggccctggcttcctgttggctgttggccctcatgtcctagagaccacctagttcccctccacaggggtccttcacaggccctctcatagcatggcagtttacttcttaaagaccagctgaaggatttcactttcagtctgctgagatggtgtctgccatatttatggcagtgacatcctagagttttgccattttctattagttagcaacaaggcataggccctgactgcactcagggggagggagaatcacacaagggcatgattcattgcaggggtcaccttaaggtgtgtctcccacagaaggaattctgagatatgcagtttcaccttaaccaatctgacataatacaaacttcaaaaaagggaaaatcaagagatcatatggagacttgttaagtttcagatgtattagacatccaaatgaagaggttaacaagacaattggatacaagactggattttgggagatatgtccaaggaccctcaaatgtgtattcctaattcagtctcttcccaaaactatagtttcattggtctgtctacttgacatcttgaacttaacaagaccaaagttgttccttcccttcccaaatctgttactgctcagacttctacatctcattaaatggtaccctcacctaccctttctctcaagaagaaaaacctaagagtcgtccttcattcctctctttcccttgccttctacattcaatccatcataattctattggttctacattcaaaatataaatctatccccttaattctatgtctaccattaccaccctagtccaagccactattaccccttcctggccttcagcaaaagcctttgaatgtctcccctccctctcttgacccatgttatgaaatggattgtgttcctcccaaaatgcatacactggagccctaacccccaaggtgactgtatttggagatagggcctctaggaaggtaattaagcttaagtaaggtcataaagatgggaccttcatcctataggattaatgttcttataagaagaagagacaccagagatatctctctgcatgcacacaaagatgacacggaaacacatccagaagacagctgtctataagccagaagagaggcttcaccagaagccaaccatgaagacaccttgatcttagacttctaacctcaagaattgcaagaaaatgaacttctgtgtttaaagcaactcagtccatggttctttgctatagcagcccgagtagacaaatgcaatggcctccatatattgttcacacatcagccagaatgagttcttcaaaacctagattaaattgtgtcacacccttgtttacaggccttcgatagttttccactgaaattggaatcagacttgaactctttaccttggcctccaggattgataccatctagctcctgctcatccttttgaccttctcttgggccattcttctctccatcacccagcttggtcgcactagctcctttctgtcaacaaaaacaccaagtctgttcccatcttagagtttctgttctgctcttgctcccaaaactttgtcccctgattcttcacacagatggtgtttttctgcactcttgcctaaatgtaacttcttcaaggacctttcttacccgcccttgtaatcaagaatttcattcactcttccccaatacctaagcccaaacactaattagtgcaccaccctacttattcccttcataatttaccacaatttccaattctctctctatgtcttgatctctctatctccctctgtttatatattgcccatttgtcctcctttataatgtaaaattcgggaaggtaatgaccttgcctcccttgctttctattgtatcctcagagattaggagcatgcctagtgtataagaagctctcaatacatgtgtgtttaatcaaggcttaaataaatctaaagctatggcccaaatgaaaatttttatatgagttttagtacagttttgccactatttccatagaatagattatcagagtgaaattgctgggtcacagtgtatgcacatttttaattttgatagatcagaagtactgctttttaatatttagtgtgactgatttgccactttaaaatttaattatcacaaatttaatttttttcctcttctcctttgaaaaatgaggcatttcaaaaccatttttcccccaatgtttttatggtaactgaagcatcattgttcattttgcaataactctagcttttgctttataggttaaattgatacagccaatttgtctataaagaaaatgtctgtgaattgagtcttctttttgaattgacccctccattacaaaatgaatgatgtattctaaagagaggaaaaaaaaaaccttctcccttttcacgtatcattcttcttttctgagtgtagagagttgttggagtaaaagcattaaagtgatcccagtgttaatatgtggatcctccaagctgaacattttaagtttgaaatttacaattgttataacaattgtcccctgcctaatccattaggtgacagcattagctagaacccagagctaggaatgctttaacacttatgagtacatttgagttggcctcattgttacccagtcgtcaatagtgtccttaacatttccagctgcctcatcactgtttgatatgtacaaggggctgggacaagggtgtagagggttccactcaaacatgtccccagtatcaggagaaaacacacttcaggaaggcatggttctgatagtgggtcaggaaagaaaataggaaaattggttttaacaccattcagttattatacttcctgcctcaattgaaatcaaaagaaaaatccttgtgtctaaagaataattacaaattttgaaatagagtgaacgttccataaagaaaattttaaatcttttttctaagaaaatacttttcctattaccttgtgcaaatggcaatctatacttattggctgaataataattgagttaattaattaattcctggcagatttattatttcattagtcactgaccatgatctataccacgatagggtgaaatttaaaagttcttccattattccttcaaattgcattgcagagctcttcacacataattaggtcttaaattttttgcctaatgttacttattgtttcctaacaaatgcagttcaaaaactttagagtgacattcacagccctctttagtcttatcacaatcccctttccagccacaatccctactattcccctgcaaccatcacacttctgctttgttgaactgccacccaggtatctccagaactttctactgttccttcttctaatccttcatctatttttatctgctcaaattctacatctttcctgacctggatcaaatgccacgtctcaattaagtcttccccaagtcctcaccccctttcttctgaataacaagtatttccttagtatttctctggtgcttattatagcactgccacactgaattgtgtgtatgtatatacattattgatttgctctattagattataagttcctcagagtcaagagtctgtgttacccatcttgtatcttccattgcaattttatagagtcttttgcataaaagatgctcaaaaatgtttaaagaagtaaaccagctgctgagaaactgctaaatgtttgcactgagcattttggcagctgtgtcatcccacttggtgatgctgcctagcacatacacactaaaacaataggcctgaacactaaacaataggccatggtcctaaagggtattttgttctacctttcttgtattgtgagttgatctttgattccggagcaactctgcatgtacgtgtttgctgtcaaaataaatgtcttttttgtctcaccagctgagatacatttaggtgaagatggcactggtaaaggaagtgtgcaggtgaagttggtgaaaatgttctgacaatgtttatattttgcaggcttggaagtctcatgccaagtgaaccatggataagtattcaagtttgatatttgcctaatgcgtggtaaaaaaataataataataatttctgtatcaagactgatttgatggccaggctctgtggctcatgcctgtaatcccagcactttgggaggccatggcgggtggatcacctgaagtccgaagttcaagaccaacctggctaagatggtgaaaccccgtctctacttaaaatacaaaaattacctgggcgtggtggcgggtgcctgtaatcccagctactcgggagactgaggcatgagaatcgctcgaacccaggaggcggaagttgcagtgagctgagattgcgccattgtactccttgcatttcagcctgggcgacgagagtgaaactccatctcaaaaaaaaaaacaacaacaacaaaaaaaaaaaactgatttgaattttgcaaaatagtattagacataaatatgttgatcaacttttggggaacttaaaggttaactttataaatggagaggaaaaatcgtcctgcagaatccacgcctcaaattatctggctttcaaaaatctagaaaaatattttgtgttgatttgtctacattacgacatataaaagtcatccaattgcctggatgtactctatccaaagtcatggcttttagataacagttaatgggagctcgaactgcttctcacattttatttgtaatctaaatcagaaactctaggtctcaggtataatcattccttatcattaagacaaaataaaatataattaatgataaaggatctcggcagttcaacttaagaatacagaggttaatatacttaaatctagattcttctgaagttctctttgcacaaaaaggtgaatttttgatgtgacttattctctggttcttggtattcatcataactaaggaggcaagggaaccccgtgacttggttgggatgcagaagccaaaactcatccatttcaggataaagagcccaggataagggagaatcataaatgaaagacaaagccagaagaaatcccactggcttagaatgaagttgatggtgaccaggaagattaaccctttccaaaatataatatggacacgtaatactctgttgatgaacacaagagtgcctatacatcattgttttggttcattactgggagcagggtaaaaagattcctaaggtctacagtaagtgagcttagtgaaaatacaccccaaagaccagagggaaagctctggaaactgctggatcatcagatcaatagactcaaagatgactaagttgggaagctttatgcagtttaaacatttgtgcagggagtatccccacacagccttttattgacagctacagatcaatggtaatttttgatcattttcaacttacataaacctattgaccccatggccacctttggggcacttcaagtcatcaaaaataatcagaggagatggtgtaaaattgtcagactgctgaagactccaagtagttgcatatgtccccaggagctgagtcgagaggttaaaatatagttcaaattgccagcagaacctcaactgacagagtgttccagagagtcttgtctttatgtctcataaaatgaggcactgatttgtatccaaactctgaccttcatgcatataaagttaaagaaggaaaaaagaggctgaatcccattgaagatattagattgcaaagaatggattattcctagtaaaatatttcttcctgtttttctttgttgagtcatcttcttcatctgctgcctaacaaaagtagctgacatgcttgtagaattacgtacaatatggacgtggacatagaatgaacaaagacaaaacagaagcaagtgcaaggtggcaggccagaagtcagggacaacaaaaaatgtagtcaaaaaaatcattaggaagagtgaaaggaaggaaagagcaaaataatggcaataaaggggaagaagtaagagtattgaattaagataatctctatagaggaaaaggagtgagagaagaaggaaagggtgaataagaagaaagagaaaggaagaaacggaagaaaagtgaagcaaaggagtaaaaggaaggaaaatcgtctttagtgatgacttttcctagttagtaagacagaacgctacatctccaaaggaaggaactgaatccaaaacatctaagatccacagtgctcaagcaaatatcctaaatttaagaaaaataacaagaaacttagtacgtaaatgagagccaacccaattcacagagtgaactgcatccaaattttgcagcaggattctaaaatagtgaactttgatgttggaaattcattcaggagagaataatataaattatttcctaaaacgtcaaagaataaattggcaaggattatcttgtcatttttatgttttcttcattttttaatatagcttttactaaacattgacaaaaaccatggctattgtttagatctatttaaggagtctatatgtggtttgtgtgtgtgtgcgtgtgtgtgtgtgtgtgtgtgtgtgtgtgtgtgtgtgtataaaactattcaggaataacaaagtagccagatgcagcagtggcttgcacctgtaatcccagcacttttgcgcagccaaggcagaagggtgacttgagctctagagttggagaccaacctgggcaacatagtgatacccaatccctacaaaaaaaggaaagaaagaaagaaaagaaacattttgttttaattagccacacacggtggtacatgactgtagtcccggctactccagaagctgaggcaggagaatcacttgagcccaggagttcaaggctgcaccgagccatgatcatgccacactccagcctaggcaaaagagccaaaaaataagaataataataataaattaaataaataaataaataatgtaatatgagaacttgtcctcagtataatttcatgatacagaaattacttttacatcccaacatgtggttatttctctcccttttttttttagatacatgtagaccaggttaagcaaaacaactgttgtaatgaccctttgtaggagtatacccctaaaaattttctgtgccaggcatgcatgaacttcagcttgcaacctacaggccatatttctatattagatggtggaggtttggaagctagggcattttgaatacttctgctttcaaggatctgagccgtaaatgtttattaaacgaatctataatgaaatcagttttgttatttttttaatggttgcctggagtgtgttggatgactgaatgccagttgttaatcattaagtactcatgttaccaaaagtgtttgatagtattgccatctaggggctgaatggaattctcagctctgaaataaattataattgagcaggtgcagctattgacaatatacatatgtttttgctttatagcccacatgcttttcatgtttcttatgacaaaagcttatgaaaaaatgtcccccagcagcccaccttttttatatataatctgttagaggtgattactatttgctttggagcgtatgcttttttggcatctattactgaatattctgaacaaagaattattcttttttgcattattaatcttgcccatgtttgccctatttccacagaaaaggaatcatttatcagaaaagagtgtttgtaatcgggacttgtagcatcttcagatttaatattcattatggtcattctagttctgtgctatatttatctaaaaggccaatccaatgttatggagaaataagtttttaaatatttatgatctaacttttaatattttaaaaaagagaaattagtatttctgtaaaatttgtttcagagtctgattgctcagcaaatgtttaaatattaaaagatttcaagaggttagcgtgtaatatcataatgggacttattgaaataggaaaattgactttacaagtttttgatatgtgaaggaaattgtattttctctgcctatgtttaacacataacaagaaataacacagttaaaatatacagccaataatgtcagaaaacagcaccaaaacctatttctacattgttttgtttttgtctaaccagtttgtttggaaaacaattctgtttgattttgtcatcttgttttagattttatccaaaatgatatttggatgcccccacacataattttttctgatgttcttgggtgcctactttcagaaataactttcactactccactttatattcttcttcccttgttcatcaaggaaagaagacaattgaagaccatgtatcacattcaaacatctaataaaccaaagcagatcattgaatgtaaatatcctactaacccagtcaaaactttctcatgatttcttatatccaatggggatggtacgcaacagaaaatgccagtgtgtgtgtgtgtgtgtgtgtgtgttcgtgtgtgtgtgtttacctatgaacacattactaccccacttgcatacataattcctactttaaaaggacatatcctttcagtccagatgtggaaagagcaccccagggcctttagaaacattaggattcttagctccagtttagttatgccaaatatgttaatgctgctctccaagcagaaaaacaaacaaattttaaaaatcctaattaggctatccctttttttcttttcttttaaagcaacaaagaccaaattctccaagcctagctaacaattacttttggtaggtttcatagttttacttatggtgcttttaacaaatgaaaatatttttatatctatattaataatagacttctctaagggtgtttgtacatgtatagttgaattggcttgttactgttttcttgtgtttatttgttttattgaattcgtaagatatatatacatgccaagagaatgagagagggagactgggaagatggagagtcttgtgtacaaacagatttggaaattaggggtgttcaggttaactctccaaacccttaatattaacctggcaggcaattatcccagtctcagacatgcagcttggcaccactgatttccattttgagctggatgcagcactgatctgaagcatcatgttttgtttttttttttaatgtttatatatcacacgctttgggctgcaagcactgaaaagtcaaggatgctatctggtccactttctgagtgtctgaaatcatacaacattgggtaatatattcacggtgtcaacaagaataagaaaaaatgcgttgttttcttaatgataattcaaaactctgctgtagtgtttgcgctgctgttgcctacaagctttggccatgaggttcagagaatgactttccagcaatattgtcagtttcaaaaaaaaaaaacaacaacttaacctgttaattttcttacagggaacaagccatcaagcccacctgtacgggttagaaccattcacaacatatcgcattggtgttgtggctgcaaaccatgcaggagaaattttaagcccttggactctgattcaaaccttagaatcttccccaagtggactgagaaactttatagtagaacagaaagagaatggccgggcattgctactacagtggtcagaacctatgagaaccaatggtgtgattaaggtaatgtctaccctgcataagaaattatgtttggtgttctccagataaatagatgagccctgacatgccatcaggtcactgtgggaaaactcccttcacagcctgtttaattctccttgatagctcctccaggcacttaatcatagatcacagaaacctagcttagatgtgtgatgcttcctataacccaacactgagctaaatgctctccatggattatctcatttaatcctcacatcaaccctactaggtgggtaccaccaaacctcatgaggcatatgcaggctaagtaactgcccaagcctacactgtaagtaattgagttgggatttgaagccaggaactcacatcagaactgaactctaaatgactgtgttcttactgcctcctgaattaccctacccagttatttgcttaagacttgcctaatttatgcttcaaacagagctcattaagcaagccacaggtgtctgctaacttcccaacttctgtatgtagccgtgagaaacaatgttataaatgttgtatacgtatctcaagctctgccagcccatgagtacagggggactgtattttcatgaatagcctgcattttgatgttttgaaccttcagccacacaaaaaccagccttcatctacctctctgatgttcctccccaaggatggtggcagacatacctgttagttcatactactgcctttacctccagtctctcctggccgtggtccatctcttaggccctcatcaactaccttctgcgggctgggactgcagagtcccccagcctgcagctgctatagacacactacccttttctttgccactccttctccaagaggcagactcccacatcaattccacatcacagggttgagactaagctgttacttttaataaagcctccctgaaaaccctaagagagggatgacagcaggaaattacgtgcagcaataactaagaactgtaactagagctcacagtcccaggtccatcctgtgggctgcctctctgcctagcttcaaggcctgctgcaagtagcagtagcaagctgcttcccaccagcctgcctacatgtggacagaagccagacttctcccccctggggcaagaggcttgagccttaggattcatgaccttaaaatccaaatcacggccccaaggcacccatcagaaaagaaagctccttttccctcaaagcacttctccttgtgggtatttggagtcatgagagcatctgcttcttggtggcataattgacaataagaatattgactccttggacctttatttacatttcaccaaatattaagcaaatatttggtgaaatacttctactaagtgccatatacttattcaagagtgaacaagacagtcaggttccctgatgttacagaccgtgtgtgagtgcacgtgcgtgtgtgtgtgtgtgtgtgtctgtgtgaataaatgtggcagagtatatgaatggtgggggtacagaaaagcaaacaataagctagtaaataaataagcaagggaattactgagagcgatgaatgctataaagaaaattaaatagaataatgtaattatgcctgctcaggctattttagaatggaatatcatttgaatcaagttgacatttgagctgagtcctgaatgacaagacagagttagtcatgtgaggatatgggggcaaaatgttccagacaaaatgaacagcaaatgcaaggcctgaagccaggaatgaacttggtgtattcaaggaaagagaagaaagctagtgtgtatgaagtatttgggagaaagaaagatggcactagaagaggttggagggactggtaggagacagattgtcccaacattgtaggctgtggtaaagtttagaatttgttccaagtgcaatgaaaaattactgaaggctttaagcaaaggaatagcatgatcaaatttacgtttttaaaaatcactctggctaccctgtggaaaatggactatataaggaccaatggagtttgagaactattaaagatttcaaggtagaattgaaggtgggtcaaattagagtagcagttgtgaaatcatgcactataggtgaatcgaagatacattcagaagatagagatgacaaaatgtgttaatgagctgaatgagagacatgaaggaaagggagcgctttgagatgagttttgggtttaggctttgggctattgatgaggaaggggagactggaagatgaacaagttaggagcaagtagatagtgtgaggtacaagtctaaaactcctgagagtgttctttgctgggataaatgttcagaatccgttagcaggtggatgttatataaacccatggtgccagaggagatcagctatggagagaatgtaactcaacctgttgagagtctgggatcaagccctgaggcataaatgtgggggtcaagaggaggaaagagagccagcaaagactgataagagggaactaggctagaaggaaaagtgcatgagtggagtgtccaaaaagagaagagaaaatatgccaaaatgttgctgagagcagaagtaaaatgaaggcagagaagccaccccgagtatagaaatgaggaggtcactgtgatctcgacaaggagagtatgcagtagaatgggaaacctggttggcatggctggttgaggagagaatggcaagggaggaagtaggacatcaactcattaaagccatttagatgaaaagaaaagcagagaaatggagcaataggtggagactgtgggatgggaagttttatttaaaatcattgaaaaatactagagtacatttaaacacgaatagaaataaccagtagagggagataaactggtgacgtaggagataatgagaataacggcagtagtgaagtcttggggaaggaggaagggatgggatacagcgcttaggtggccttcagtaggtacagagatatttcattcatagcaaaaggaggaaaagcaaatcatgtaagtctagattcacatggatacagaggtcagaatatataacatggaggcattcttctctaactgcttctattttcagtgaacgatgtggttatgtcaacaatcaatcaacggtgagggagggaagagggtgttagtggttaggggaaaggaagaaatatgaaataatcacctgggaaaatgacagagcaaaagcatgagggaataaaataggattacaaattggtaatcgcctatttaaaatgtatggatagaagtttaaagtgagaccaataaaaatgtttgggtgtttttctacaaacccatttcagagcttgagtatagagggacagctaaattttacactaattagagatttgccgggtgaatatcaggggcagcaaggggtgcttggggggtcacagaggctgcaagctagttatggaacctatgctcccttcagaagatatggcagtccccttcccacatgggggtggtcttgccctgggtcctcaacaagaaaatcacaccaacatacaacattccaacataaagaggtttccaaacttctaggctgtgtaatcttagggaaaaaatggagtatgttaacaatttagtctaaattaagcttgcccaagaaccacttctgggaatgtttcaagggtgtgccttccaagggctgtaaaatgtgtcctgtcccctcttgagagtcaccatgatagggagtcatcgaaaggagtgtgtcatctctctcaggtttgttggagcaggaaaaggttggaaaatcactgttcaaaaacacctgcattcagattaacttacttcccatctttcaaaaaaaatgaaaacttgctctacatttgtacagtataataagcattcagatgtttttttccagaacaaaagactactttgcccccaaaggagcaatcagttcttccatggcctggaagagaaaacagggtgtttttttccatcccctagtcataaagatttatatacatgtatatatgtacatgtatatatatgtatggatatttgtacttatgtataaaatataggtgtctgtgtgcctaaacacacacacacacaagcatactctttcagccctggcactctgtaacaacaaatgattaagcgttgtaattccatttcccagcaaatgccgtggaaggtagaccctactttagtcagtatgagatcagaagcagttcatatccataaaacaggagactttaatactattctctactttaaaaaaatacaaataggagaaaccttgtgaataccatttaagtcaaagaatctgattcaatagcccttagttttgagataaatgtttatgtagttcccaaactgaaaaaaaagaaaagaaaaaggcaaagaaaaacattgtttgtctctctgtgggccttatgttaactgaaaaaaatcacatatccccaattaatatcagaatacttcttctaaattagggtcatcaaaataaggaacaagggggtgaaggttaaaaaggggctaagtaactacacaaagaaattgtatgctgcaagttatcccttttgcttctgtccttctgtagacatacaacatcttcagtgacgggttcctggagtactctggtttgaatcgtcagtttctcttccgccgcctggatcctttcactctctacacactgaccctggaggcctgcaccagagcaggttgtgcacactcggcgcctcagcctctgtggacagatgaagcccctccagactctcagctggctcctactgtccactctgtgaagtccaccagtgttgagctgagctggtctgagcctgttaacccaaatggaaaaataattcgctatgaagtgattcgcagatgcttcgagggaaaagcttggggaaatcagacaatccaggccgacgagaaaattgttttcacagaatataacactgaaaggaatacatttatgtataatgacacaggtttgcaaccatggacgcagtgtgaatataaaatctacacttggaattcagctgggcatacctgtagctcttggaatgtggtgaggacattgcaagcacctccagaaggtctctctccacctgtgatatcctatgtttctatgaatccccaaaaactgctgatttcctggatcccaccagaacagtctaatggtattatccagtcctataggcttcaaaggaatgaaatgctctatccttttagctttgatcctgtgactttcaattacactgatgaagagcttcttcctttttccacctatagctatgcactccaagcctgcacgagtggaggatgctccaccagcaaacccaccagcatcacaactctggaggctgctccatcagaagtcagccctccagatctttgggccgtcagtgccactcaaatgaatgtatgttggtcaccgcccacagtgcaaaatggaaagattactaaatatttagttagatatgataataaagagtcccttgctggccagggcctgtgcctgctggtttcccacctgcagccttactctcagtataacttctcccttgtagcctgcacgaatggaggttgcacagctagtgtgtcaaaatctgcctggacaatggaggccctgccagagaacatggactctccaacattgcaagtcacaggctcagaatcaatagaaatcacctggaaacctccaagaaacccaaatggccagatcagaagttatgaacttaggagggatggaaccattgtatatacaggcttggaaacacgctatcgtgattttactctcaccccaggtgtggagtatagctacacagtaactgccagcaacagccaagggggtattttgagtcctcttgtcaaagatcgaaccagcccctcagcaccctcagggatggaacctccaaaattgcaggccaggggtcctcaggagatcttagtgaactgggaccctccagtgagaacaaatggtgatatcatcaattataccctcttcatccgtgaactatttgaaagagaaactaaaatcatacacataaacacaactcataattcttttggtatgcagtcatatatagtaaaccagctgaagccatttcacaggtaggtagccatgtctcggttttctgagagtaagccactgctgacctttctattgcctgagcccttggtcagttctaatgaagactctaaaaatgggatgcaaggtgtccccaacctccatccacctaaacgtgcatagtagacaaagcacatcctcacccaagcaaagcctgcttgcataacctccagagagcagaattctttcaggtgatgttttgagagtcagtgtttcagaaaggtttgcaatgcatcctggtatctgaaataagtaggacagagatgaggctagtccccctggaaatacgcaggcccctggacagttctgacagccccgatagggtcatctggccagactgtgaagaaaatgatgtattattttaaggttaaaaagtgccaatcaatgagcgcaattaccagccagagttagactaaaacaaaatttgtttcgtgaagagccttcttatcaaatccagcacttcttccaggaataataaggcttctctgactctactttcttatggtttctcaggacagtgccactttgctagctcatgttttcctagcggtcccatctgggctctgtgacatgcatggaagtgcgttgttctccacacaaaagaatcttgcccattgtttaaataattgtttggcagttttccccatcacattttaagtaacttacatccccagagagaagggtaataagagacattttatgcttaaaatttagtaaaatgaacagaatcacttaaaaaaattaaaggctgaaagagtgttgatttccaactacctcaggtaaaattcagctattattgtaatctagtgatgtgtagattagatcctcctataattacctctgatatatagtgctgttgaaatgaaacattcgtggttttatgcatctactcatgacaattatttagggtctattaaatattaaacagtaattaaaacttcctcaggtatcctctgcagctaatccacatgctatgtgagttggcttttatattaccttacactgattcagggcattaaaaaggtccactgtagctgcagagctgtatattctagactggcttcctctttacctgactgtacctccaactttcaaaaaccatatcaatttgctcccttttgaaactcttattcaaaaagtattctagaggtgaaagagtttgtccaggcatgaaaggaatgctttttccaggctggaaagaaaagtttaatttatctgataaattgcaaggatatttaagaatgtgagagaaatctcttcattatccactctaactgaatctgtaagtggcattgacataaaacagagtatcacttctatatgaagttggagttcatgcgtggttttttgtttttgtttttagtggattaatgttcactgaatattgcaaatgtgtgtgtcctcctttcagcacccccagctggtcagtaagaagaaatagtctgggaaagtcctaagtagcagaaggaatccagcccaaaatttaaaaactaccacggataacccagaaaatgaataatctttatgtgggaaatcaaaattgacttcacagaattgcttagaagtcagatctaccatacacagctatggatttgatcaccaataaactggtagccctgtcatggtggagatcggcatgagaggagaaccaggggaggaggagaagaaagtgggaataaaataagtcacaaagggaaaaaggtgtaattaagaaagcaaaaaggtggaagagacagaacatgtacaagaacagaaagcagtgattcaaagagcaaagaggggaggtagaaaatagaagaggaaaaggctagaactaaaaggaataaaggtagaaagaagatagctgggtgcctgcgggaaaattgaaggtgtcataaaatcaatggtggttgggaatagagaaaaaagtgctcatttacagccataggcactaaatactcacaaaaactcattttgttggaaaggagaagtccctgctatgtaaatagaccttttcaagtagcagagaccagctatgaggcaaaacataattgattagttgaatttaactggatggtgataaggtgtcttcatgattgataatctggtgtgtagttgggttaactttggccccgcaaggtctttgtatcatgtaagggaggctgttttaagctgttaggtatcaggtgaggggatttattaccactgagaccgtaattccatgatgttccttcatgacctggaaacattcctgggggatcattccatgatgttccttcatgacctggaaacattcctgagggatcatttagctctagctgcaaaggtaggagtccaggactgctgagaactgcttcatactttctaaggtctgcattcttcattgctatgttaagtaattctgaagagtaccagaattttcatgccggaaagaatcttgagagttatttattccatacatccttgtttaggggaagaattgcactcacccctttcgaacagatcaggaactttagtttagaaagccagggggattttgattgttcaaaaatttccatggaaatataatttttttttgagacagagtcttgctctgtcacccaggcgggagtgcagtggcgcaatctcggctcactgcaagctctgcctcccaggttcaagccattctcaactttgttattcttaagaattagctgtgaataagaatacatgtaagcttgtcttttttttttaaggcctggtgttttaaagattcttcccatgaaaatctattttgctgaaaatcactaatttctgccttatgtcctgaaggtatgaaatacgaattcaagcgtgcaccaccctgggatgtgcatcaagtgactggacattcatacagacccctgagattgcacctttgatgcaaccccctccacatctggaggtacaaatggctccaggaggattccagccaactgtttctcttttgtggacaggaccgctgcagccaaatggaaaagttttgtattacgaattatacagaagacaaatagcaactcagcctagaaaatccaatccagtcctaatctataacggaagctcaacatcttttatagattccgaactattgcctttcacagagtatgagtatcaggtaagaaatgtgtattataaacaattcgagctgattgtttgcacccgtcagcacctgcctgtaaaaatggtgcacaatttgaaaaggcacttaaagaaatgtaggacttaaggagaataataatattccttaaaaatttttaagtggtaaatgaggaaaaaccatgttcattgcctttttcattttcttggtttttgagccatattatatacgttgtttttcttaagtagattccaggtgaatttgcatttcttattagtaaagtggtttctgccattaagattccctctgtcagcgttgccttggtaggagacactccttatttaaagatcactttgaaaataactcattactcgtaccaaaataaaatcaaatagcaaacatctctagcctcggtgctcaagaaagatacagaatgttgaaaaaagtctagaggaatacaactcacctgcccatggcgatgagttaagttttctctgaggatggcctaaaaaaataagactgcattcttaaaaagccaagaattaagaataatattcagaaaatatggtgaattctgtggaggacttctgttaggtttgttttgttttgccatcagagtccatttgcattcttcttgtgataacaacctcatttcctgtgggagaatgtgcttcccccaccctttgctcaggcgtggtgggagtgtcaatcaatgtgtcaggctgtcttctagccaagtggtgggcacatgagccgctcagcccctcagatttgcctggggcttgatcttcagcagagtgactcagaattttaaaaggtggaggtgagaagtcgtgataaaatatccctaacctcaatctaaaagtttttcttttccctgctatttccaagcatggttcttcaaccgttcttttaattccataaactcacagtaaattctcatttgcttaagtcagaatcagtgcctcttgcttgcagtcaaagaaagcttactgactgatgtaagcacttaagtgccaggaacaatgccaacagaaattttctaaaagaggaaactgagccttaaaaagcttattataacatgaaatactaaaaataataagtcaccaaaaagatagtgaccaaatcaatgagtacagtgaatacagggaacattttaagcatgaaaagaatattttaggacaataatgtatgggacaaattaccgaattaataagatttaaaaatataaataaattctcgaatggtttggaaaaatacacagatataaatccataatcccttgtttgcaattccaagtctaaaaatctcttaaaagtattttcttgctttaccacaagtcatttggcaacaaaacccaatctaaacagacttgagactatttacagtatttatttatcccatttaatatgaatatttatatgttttgctacaaaaatattgctttattataagatggctaatcagatcatggtatggatattacaaaatatacagtatatacattttatcctatttcaaaatctaaaaacaaaattattttaaaacacatcaggcccccaagggtttaggataagaattgtggtttatgtcataaaggaacaaaatacttaccgatgccaccatcggaaacgtaacactgttagaaacagccagaacctacgtgcctgcccttttgttcttttctcattacctttattgagaagtgtcacgttatcaagctgtcagttatctagtctcccttacaaataaaaatggtaccttcgtgagagagctggatgaaatcagcataaaatcttcagccgctaattaaacgcaacttaatgacccatatataagaaacacaaactttctctggtattgtgttgtgtcattgggttaaattctggtcacatgatctgtggaagtctcattccagtttttgtttgtttgtttgtttctttgttcgagacagagtctcgctctgtcacccaggctggagtgcagtggtgagatctcgagatctcaactcactgcaacctctgtctgccaggttcaaacgattctcctgccttagcctccagtgtagctgagattacaggcatgcaccaccacaccaggctaatgtttttttgtatttttagtagagacagggttttgccatattggccaggctgatgttgaacccctgacctcaagtgatcagcctgccttgacctcccaaaatgctgggattacaggcatgagccaccatgccaggccccatcccagttttctatggaatggaaagctccaagcatgtgccttgtctctagtcagatttttcatcaggcactaaggatgactaagaacaaagggacccacatttcagaggagaggcaagttaagaaccttaggctgtgtggtttcttttgtaactgttactatcggctctgtgttacactcctcctccatactcatctcactcaaatgaaagtatttaatttggtttttgatctccaatttttatttattagctaatcccacgtagttacaacataaggatagaaaacaaagaaaatcaaaatctagcttagcccaaaggcccagttcttatggaaaataatattttgaaaagcatagattaaatgctgaaataaatgatcagaaaatattagtttcatttagcctgtgtaaatattgagtctatgtggaccctgagtaatcttacagaagtcatttaggaagttatatactaaaacaatttatttttctttaacaaaagagcatttttgtatttgtgatgaatttgcattgctctcaaaaccacttgagggttacttcatctgcaagtggcctttgaaaataccttcattgtcctatataaatctgctcacccagcaactgacagtgatttcacccttctgcagaggagtgtgtttttgaggtaattgtagattgtagggaataaaaacaaagacctgagaaacttcctagcagtggggaaggattaatcagaagatcgtgaggatgtatagttggggaggttgccacccacatggtgtgccttgcaagtatcagctggggctccccaccaccttcctacactacattacatcattgtactcatttctggttttgagttaaatcattgaaggcagttgttaaaatttagttatgtgaaaagaacaagacagttttcactagtctaaatcaactcattccatcagttggccagtgatagaagagggtatcgcatggataagttcttttgtttttctttcttcttttttttttccttcttctttgtttttttccttcttcttctttttctgagacacagtctcgctctgtcacccaggctggagtgcaatggcacgatcttggctcactgtaacctccgcctcccgggtttaagcaattctctgcctcagcctcctggtagctgggattacaggcgcccgccaccatgcgtggcgaattttttttgtatttttagtagagacggggtttcatcatcttggccaggctagtcttgaactcctaacttcgtgatccacccacctcggcctcctaaagtgatggatgagttctaacgggcaggagggtcaggaaatatctggagaaatggatacttatagagagggaggagctactcactgcagaaaaccaaagagggaaattaaatgagcagcaaatgtcactcacctcaccacaattcatataaccagcttgataactagctcctttgaaggtgagcaaaatccatgtgatatcacaagcaccttctaagtgttcactaatacttcaatatggaatgccctaaaggtagcatccccactgtttacagtacaagtggaggacctaagagcttgttcaaagggcagactcctgggtggaatgggaagggaccccagcaaccagtattttttttctttttttgagatggcatgtcactctgtggccatgctggagtgcaatggcgcaatcttggctcactgcaacctccaactccccggttcagtcaattctcctgcctcaccctcccaagtagctgggattacaggcacacaccaccacgcccagctagttttttgtatttttagtagagatggggtttcaccatgttggccaggatggtctcaatctcctgacctcatgatccacccgcctcagcctcccaaagtgctgggattacaggcgtgagccaccgcgcctggcctagcaacctgtacttttaacaagcagcctggatagtccacaacccacttttttttggaaatactgcctcagagggtgagacattgctgctatgctacttaagccttattttcaagcggtgattttctgaatcagtggttctcagctttgtgcattagaatcacctggggaaatttcacaacattctgggtgctgatacccagtccccattcccctgtagttctgattctgggatgggttctggaatccctgcgattcaaaaggttcccaggtgattctcatgtgcagccagagttgagaatcactagcctaaactgtcataaacagcccaaataagtgaagccagctccccacaaatgcctaatttacatgatgatcattgataatagcctattgacgttggtctatcctggctttcctaaagaagggtcctattgttttgatgtgaaactagaaaggagaacagaatatattatctacaaagtccatgtctcagctactcatataatttattttaatcttcctcatggattttatttggattttgttattgttgttttattttcttttgtttcttacttgggaggtccggtctttggtggtaagagtaaagttcaccatcatttaaaacaggggatttttctagtttgagtcatttcagcatagcttccagaattctgggattctgaaggataacactctggaggattagctttaataaagccagtgagatctaaaatatgaatcaaaaaattaggaatattactttttcttgttttccacaagaatgggttggtggctttacagagtgcactgcagggtcccattagaaagcaaacattctctgtgaatttcaaatgcaacttagtttaccaaaatctaattctcaaacaaccctgtgaatgtatgttccatgcataaatgcgatgcatctgtactaaataaaattcttccattgcacagacctcttccttaaacagagatcacagtcttgcttgtgctacagaatatttacaaatccaagaagatttttttaaagacaataatcatttctatcttcaaccctttcaaaattgggctattctaatacatgcagtgtgaacctccaaattctatgtggagcagttcttaactgtttagcagcaaattaagacaatatttttcccacaggctttgagagggacctgggtgtgagtctactctgttaagacattttggtttttacctttggggagtgagctgaggctaatgaatagctctcagtaattgtgcattcatattcatactcttgcttaaggcaaagactcaccacggatttgatagggcccgccaccaccccccctttcactgattcatgctgtcagtgacttaattagttttcctgaaactatctcactttgacagatttttgcggtaagcacccacgcacactcagggtctctgaagcattctggtgcctcatgactgggtgactgagaagcagtaggtcagtcttagaggaaactctgtgactcatggcatggggtctgaacttagggctagtgctgcaggagcccatgcagaatggcagtctgctgctttctaacagaccaacactgcccccaaacaagaggatggaaagaagggctgtggaggagacacagaaggggatcctcactgttgctgccagtggcagctgcctgaagactgccagaggtactgtggaggccttccctgcaccagcccccaccataggctaccaaatcgttggcgatgagttagaagtgggagggagaaaggccaacatcttctactccttctctcactacttctggatatttgagcacattaacctctttgggcctttcctcataatataaattaggcctgctatgatggaatatcatagactgggtggctttaaataacaaatatttatttcccacaattctagaggcgggaaagtacaaggtcaaggcacctgcagattcagtgtctggtgagggccaccttctggcttacagataatggtcttctccttatatccacatataccaggtagaagaacactagtccccttcatgagggctccaccctatgcaacctaataacctcccaaaggcctccataccatcatattcaagattagccttcaacatatgtatttgaaggggacaaaaacagtcagttcatagcactcatctataaaaggaagcaccctccagctctgtattctatgggcagagtagtggtaagctacaggtatataatttttagaaagtctaatcaaactttatcttctcttgattggtttttgtaatctacagtttgtaaaaccctacaaaataaattctcacccaaagcaacagaattttctaatggtatttagctttaagttgtgttgatgcaagtgaatgtatgaaatcagcttcagataataaatggatatatggttattcatcaccaagatggacacatggaaatataattagttgtgtctctcattgaaacctaacatatttattcactaatatattttttaaagtatagctatattataacatatgaatgtaaataaataataaacttatttagttagctacaaataagtctcatttatgttcctgagaaaacccacactatcaaaaagttgtcatgactatttcactacaagtaacagaaagccaatgtaaactaagttaaacagaagggaattgtttctgctctcgcatctgggaagggcattgaaggaatcccttgaaaccaaagaaaagatatgaacaccaggtcctggaaacctgggatgcaggactcggatgatgtaggattcattcattctgtccctccttgccccatctcagcttgtctctgtttggcttcattctgcacactttcaccaggcatctgaggaaatcactcccagattcaagccctttctgtgcatcagttttcttgtctttaaaatgtgaatagatatagcattggactcataggcttgctctgaggttaaatgagttaatatgtgaatgtgcttggaacagcacctcatacatagaaaccacttcgcccatataacaataatgattattattattacccatccaccttagagtggaaagaggactataagtcaaccaatacaggactctgactgatccttttgcactacctgccttcctgtgaaccaagagaacagaggactatgattgagcaggtgtggtcgcagggcccacctcctacaggcagggctgcatgaggtatgcgggaaatgcttccagccagaagcaagaactgccctagcacgctacacacaccaaccacgggaacaagtactccacacctgtgagatattgacaatccttgtgctctttcacattggatgctcacacccttcctgttttccaaatgaagaagctgagttaagatcacatagcttgtgcaagaaagatacttaatttctgataacttcacctttctcatttaaaaaaatgggtgtgttatgagaactaagaaatctgtgtgtctagtaggatgcctgctacttagtaggtccatgcccccatccgatccccccaggatctcactagttaaaagaaggagaaactttcattcaagactgtaaaaaagccaggttaagacatttcttttgtctatatcaacaagtcattgataaaatgttagagtgtaaaaatctcaatcaggagtacagttgcctctaaaggtgtgatactccttccgctaggaagttcaaccctcctcatccttgccatttctcttctcagaaaaagagtaatttacccacatacccatgactaaaattccaaactctgatagtctgactctacttttatgcaattagctacttgctttgtattgcctgttttctattgctgtcacccttaccccatctcttttctatatcacatttagagaaaacatattgaacacattttctgtttagttttggacttgcatttaattaggtattaatctcactaatgtatttccgaccagcatggaggtttttgtctggttaatttctcccacaagaactaagctccccacacccaccccaactcccacagctcaaggttttaaatgatttattgatattgtctgactcaggcagtgtatttattctaaaactttagggcctgagtgcacaggttagactgaaggccactgggacatttccatgtatagaaaactaaagttcgccactaggcccagggcctgatcattttttgcatcgagccttttgttcccacgggagatcatttccacctgtcagtgtgagcacattcaggagcatgctctaattctttttgttcttgttccatctctcatggcaacccttaggactttattctgaagcttctgttgttggcaatcttcatggcgcctttgggacaagttatccatgtgaagatgggttggttctcaccctcttgcagatgcaactcagatttatatttcacttaaggtgatgttgatcttcctgtctctgtgttggaagtttgtttgctgaaaataaaatgttaaacacaacagatgctcttcaactgaatgtagataatatgccattccagcctgccctcatggctcttcagatggccatgaaaacaaaggctcccaaagtcacctaaaacttaggtcctgtaaaaacatctaggaaagggtaagatgtgttttacttattttcctccatcctgtaaattgagtatttaataaactgtccttattaagcacctacaatgttcaaagtgtatacctagttactaggattgaggcaggaggctaaaatccatgcactctccccttcagggacttaaattatagttgataagtcaaataaagatgcccatgaataatgtatccataaaaatatggctaggaacgttgatgtttgcaggatctgagtgatggcaaaacagacccagggaggaagaagcagcttctttatcttcagggacagcacgatttccacaccaaactctaaaggccactcttattctactctctggccagatggttttgtgcaggacaggtggcaccttgatattaaagaggtacttgactaaaatcattccacagagacatgaaggggcaccatttctctgttccttcagtcttacaaaaagaaatccctttctaaatctccatccttatgtttagaagcctctcttagcccacctactgttattggtacccatgtaatggttcaaaatattctccactgtatcaatcgggatctcagcaggaaacatatggcacattcaaagggtatttgaagaaaatttaatgaagaggctatttatggaggtgtgggtagaattaagagaatcaataagggatgttgaagtacccagggagtaggaagagccagaagctgttaccttctaggcctgcagggacaatggaagaaagtgggtcattgagaggaaattcagccttgtcaacatgcagtgccaaagagaggagcaggagaaacaaagaacctgaactctctcttccctttgatcaaaacctaatggaaaggagccagaggagaaaagattccaggtgaggcagtctgatgaagtcagcattccagagtacagaccaagccagagaagggcagaggatggatctggggaaaaaccagctcgtcccccacactcagattgatgctgcttctcaaccagtatataataatgccttcaccagtagaatcctttctgggctagaggatcacctggccagctttggcttgtcaatctatgattattgataaaccactaagtaaatctgaagacttaaggaggattgtacttaagtacttgaaccaacagcttattacctttaaattgtaaataaacatctcaggatatatgaagcaatctaatctgcaggtggaaacaaaaatgttaacacattcaaataagtcagatgccttaaatggtaatttgtaagaacatagttgagacttcttcttgttaattgatttatctgttgatggagctgatcattactaatatgcctataagcatctagaaaactgtacggttctctctttgattcctataggcatatttctaatggaaaccagtaataaaattcttttctctaaagaatccattgaattgctctaattttttcttttgttcatgtttgaggactttttgagaaattttaactaattataaaacaaagtagagaagccatccaattaacaaatttcattgtagagcaatatttttgaaaagccaggcttttatttactctaaccctcaaagctctacagtacagaagtacctggaagaaagatacacagggaggtgtgggctaaattccaaatgctgtggggagttttccaatcttattaatgtgtaacaactaactggaatccaggagtgagttgcacaattgctatctagccccactagatcccccaaactgttaagtcattctctcctgtcttttcacacaaataatgtgatagtaatcactattatttatttagggtttgctgtgtgctaagggctgtgttaagaactgcatgtatattaactaatttaatctcaaacaaccatttgaaataggtgttattactgacactattttacaggtgagaaacatgaagcattgaaaaattagataccatgcccaaggatatagagttgataagttgaaggactcaaattcgaaccttaagattcagtttcaaagactggtttcttaaattctaccccaacagttacctccaaattgcatttgtatgcagctttgggactttcaaaaatcaatgaaatatttataaatgtattcatcccctaccccattcctcagaaatttctagaaacaatattgcatgtaaatcttaaaatagtcctgtgggatagatgttgttatttcttagcatagtcaagaacctgaatgatttagcaagttacctagtcaaaaagcaacagagtcagaactcaagtcctgactttctgaccccaagttcaaggtggctctgctgaactgcagcttcttcaagtcacctctatcaggagcacaaattcctgaccctgtgaagacagaccgattagggttgcagtctaggctacatgaattaccaattctggatcctcagctattaatttaaactcactaaacctcagttttcttatctgtaaaattgagattaaaaaaacaaacaacaacaaaaaaaacttaccccaggaaagttgctgtgaactttaaataagttgactttaaggctagggtattgtcacttacaaaaaaaagtaaaatttaatatataaatacatagaaggtgttcagtatccagcattcctgcaaaatgaaaatcaaataaagtcactctcctactgcaaaccctacttcccccattccataagatgcaaactcctctctagttccatgaggactttcgtggtctcatttttgtccaattctgtcctcatcccattgctttccggcccttactcactaaggtcagccacactggccttcttgaggatctagccttaaggcctttgcacatgcttttcttttccatagaatgctcttccctcagatcttcatctggtactttctgccaattgtttcccagcttgatggtcatctgttgagagaacctcctggataagccaaccattttctgctctatcaccttatgtatatcaccctacaatctcatcatttcctttctagcatatatcctaacctgtttattttatttgtgtttttattgattgcctctcctcaccaggatgttaatgccagccttgttcactgttgtatccccagctcatagaacagcatctggcatatagaaatggctcagtcaatatgtgttgaattcatggatgataaatggtcttacctaatttactatccttcacggagatgttaatcacaattggtgattgtgatcttagcttcttctagcaacttattgtggataaagtatatattttaatgctatatccattagggtatagttattattgcagagaacataatggaatttcaatgcatttacacatgtttgaacaggatgaaatatatgagtagtacttgcttctgtgtaatatgcaatattgctgaaagcatgataagtggcacgagagatggatgtcacgttgtttgtgatagtttcccctgtctcacttttaggctaccctccacagaaaaagccagtccacgcagggctctatgaaaagcccaggacagcaacccacccatgtggaaggtgtgtacaggccttcttttaatggccttatgtaggaagatgtaaagagtttgggcttttatgtcacatatctgtattggaaagccagccttaccacttaccaagttgcataaatttctgtgttcctcagttttctcatgtgtaaagtggggataataataccaaccatataggattgtcgagaggaaaaatgcaaaattagtacatagaatacacttacaaaagtgtaagtgctcaataaaccccaaaactacttttacatatcctccatgagagtcggatgggggtgggttcctgtttcctcttagggagagcagatataagaaaaaaaaaaaagtatgtgataactccaaattttgattatttagttttattgttaaaagtgaatcagggttgggaggccaaggcgggcggatcacgaggtcaggagatcgagaccatcctggctaagatggtgaaacaccgtctctactaaaaatacaaaaaaattagccgggcggggtggcgtgcgcctgtagtcccaggctactcgggaggctgaggcaggagaatagtgtgaacctgggaggcggagcttgcagtcagccgagatcacgccactgcactccagcctgggcaacagagagagagagactctgtctcaaaaaaaaaaaaaaaaaaaatcagggcaaatttcagtatttcacagtgttaggtcagtttttccttcttcaggtattagaggagaaccatattcacaagtattaaatggctccaaagagcaaggcggtatgagaagcagtagcgacaagacacccaattctagcatgggaaatgtcttgttatttttccagtagcttcacgtctctgaacttcaaaagtgctcatggaaagcaagacaatgtcctgctgtaccctcttcccctgggtcccagaattcaattaaaatcacgttctatcttgcctaatccaaagtgttttagatgaagggaacctggaaaacgggactatatctgtaaaagtgtgactgtattgtatccagcaaggttctatgcagatagagatgctggaaaacatccatttgatggtgaaagaaaatcagatagatagacagttaaataaatagctcctagagcttttcagcacattattccttcataactggagcctgcagggctactcatgaaataaaacaatcttgtaatcatgtaatttcaaattcattgcattgtcttttttgccaacattctttaaccgcgattccagcaaagaagatttcagcatattgctattcaaacatattcaaaacctatgacaagctaccctttaagaaggcattagcgtgagtgccatgggaaaatgtactccaaggttgtagatgaattgatatgatctccttgattgtatctttttatttatgaggcataatttctgagcactggaaagcaaactgcaatgagtgatgactaacaacaaccaaagtcataaatcagcagcagtgaaagaagtagtgattttgatcgaatctattgaattagctgttggccttagccaatacaggtattggaaagacctttttaatatctatttgtccccctcatgggaatgtgataacaatctcattacatgcccctaggaaacaaataatttaattgtttgcccgttaacatacaacctgtttacttattaattactggcatagctgttcatgctagattttttgtttatttctgatgtgaattgttacaaaattatgttcacattccttagtttttataaacaattatgtctccttagagcttcttgatataaatttgtcctcagaattgttgaaatgctttttttaatcaaatattgtcattatcccacaaggaagtatgttacagagtttcacagaagttgcagagagctcagatattcttccctctcttaatctctgacagttaacacttttactaatacaactcttgtaataagcagcctggataaagaacaaaaatctcaaattgctccaagcgtaaagacagtcatcatcacttacattaggagttaacagattagagatcttttgtaaaagattaatcggctgaatttggttactcctgtattacaattttatgaggagaataatagcaaatgtaagaccaaatagacatcagcttggtgctgacccatatacaaaccatccataaaccatatattatgaagtatgttcccttgatttgaacaagacttgtagcattgccttggccaaaagaatcataaaatattttcacaatttaggggtttttcttatgataccataaaggaaaaatgcatcaggaacccccttgaaatgtacattaataacttagctttgctgtaagacaatacttggaaaacatcagtcctaaggaaggttatttcagaaagatatgagacattgagcgaggcaaagcattaaggtgaaaactactttgtttagccaatacaggcattagaaagacctttttaatatctatttgtcccccttatgggaatgtgataacaatcttaacaagttaagtgtggaaattgtgctaaaaaataactagcacaggccgggcgcggtggcttacgcctataatcccagcactttgtgaggcggaggtgggcagatcactaggtcaggagtttgagaccagcctggacaacatggtgaaaccccatctctactaaactacaaaaaattagccaggtgtggtggcaggcacctgtagtcccagctactcaggaggctaaggcaggggaatcacttgaacccaggaggtggagatcgcagtgagtcgagatcgcgccactccattccagcgttggtgaaagagcgagactctgtctcaaagaaaaaaaaaaaaaaaaaaaaaaaagaataactagcacagtaacagaagcatccaaagggtcaccattcttggagatttctgatacatttccccttctcccatcctgtgcagactgatggtcccttctctttcccattcacaaaaattattacaatgcttctgttcacaaatgtttgcttttctcctagaataaaattaggaggagaaatgttgggttgagagaaattgggagcatttagaataatgttactctgcactgagagaaaaatagactcagcaatttctagaaatatcaaggtttcaagaaattactccttaagtgaaaattaggaggcaagaagtggttctacaaagtcagtaaactctagttctgtttggaactgtgaaaaaacacagtaattaactctatgatgattattgaattgtgacatattccaagatacatttattgtgtttatttgaatgactaaagttaatgtgaagtataactctaaagagacataacaaatagaaattgaaaatgtacagtgcctatattctgtacctggctctataaagaataggcctttgtatttttcaaataatattgggtgtaaaaagcgcttggaaatatgttgaaagggcagagtccaaggtcttctcaccagaaattctgatacaggtacccaaaatcattttgatgaccatggctaaggaatatattgtgacaaagacttctcttaaaagaagatttctaagaggcaattttcaagagagaacaaatgattaaattcattgttttcacagcaatgtgattatggcagcttagtggcagatgttgacactccatgtaattaaaaatttttaaggcaaaatacaataattagtcctttggggtaggaaagagtaaataaaagaacaatttcatttttttaatgaacaacaagcataaatatggtaatagtctctagttagatttaaaaatatattacattgaaaacagaaattccattgaaaactgacatattaatctatcattttgctagttaattacagaatttgtggctaaacaattttagtttttatgcttattaaaagtagttaatctatgttttctatgacattttacattgtaactttcttcatggttacaacagaaaccttagagaaataaatcaacaagtcagtcagtcctaacttttcattattaacgactagggaagtttctgactctacaatcataactgtgtgtgcacccactcattcacatgtgaaagtgttcaccaaacccaaataataatgtatttcagcagcaactttaatcatctttaatcttttattataaaagaataaatatgttcagtctatgagaacacatggacacagggaggggaacatcagacacagggaggggaacatcacacaccagggcctgtaagagggtggaggctgggggagggatagcattaggagacatacctaatgtaaatgatgagttcatgggtgcagcaaaccaacatggcacatgtatacctatgtaacaaacctgcacgttgttcacgtgtacactagaacttaaagtacaataataaaaaaatatatatatgttcagtctaaacactgtaggaacaaaaatatcctgaataaatcaaagatgaagaacatcttggcttttttttctcttggccatagaatttataagccttacttgcttttcttccccaataataactcttccatttttctaggagaagcccacacactaaagaaagagaaaatacacaactgtttgttcacaagatattttatttattgatttttatatgggttcattgcaactaaaagatcgggacatattgctaaaaagttttctatgtgggatctctgctgcttctttctctaccctataaagacagaatcgaatcttggggcattgtttctcagtgggaatcataagcataacctgttagtatttttaccctgaaccctgaactacacttcaatacttttatctcttgcttagccgggcatagacaaaaatccacagtgatattttagacaaagaacgtttttacctcagcagagacagagacaaagacagagagacagaaggagacagaaaaaatattattcacaggttcttttttccttttctcctagtggtttgatataacagagacactgcctcatcatacaagttttgtgaaattcataatgcttcattatctcagtcagctttctcttcattctgttttcattttcacagtagctcatgtaaataggttgatcctgctttgcataagcatgttgatttatatgaatgctattttgatctcaaattgattgaatactaaaaagaaagtctaggaaaaagagtaatgtattatgaaggactcctgccaaagacaaaatagcctgcatacattccctattagtgatggggaattttgaattgcctggttttcaaagagaatatttccaaggaaatatagcaaaacactataatactgaggcccaagtgtttttaaaatccagggattaaatcacattttggaactagaactccacctagtagaagttcacgtaacacaggaaggctgagatttagtacaatctacgacactaccattaaaaagccttaatagtatttatgattctatatctacattgaaaatgaaagaaaagttaatgttcataagccagagccagaactgtgctgagcacttgctatgaattatgcttatttcatctcattttctttcaacaccctatgcctgcactacttccatctcctattggtgcacagtaattaattggcaagttgttgaatttttcttttattatacctagttgcactttcttcctcattttcctccccatccattgtagcctgaatttaaattctgcctgcgctcaaatcaccaaccaaagttctgctcttggcaaaaaacgtcatatcaatatttgcaccttactttgcattcctttgtcaagaatattgttttaaatcttgtcattcattgtgtaataataggtgtcccccccaccacttcccagaaagatatttgcagtaaaagaggttgttctggggcacagtgaggagacaggaaccctcctcatcagccctgaagtctgacttcttcatgaataacctccacctcccctccctagtgtaagtctgacctcacctatttctgaggggactctgagagcagctgcagttgtattctgatggatggactctaacttccatgaaatctggctctcccattgctagctccttacttccctgtgcttaccaaaacaaacctccctcacctaagacaacttgtacatgtctatccatccttgcaagctaagacaccttaacctaatctagaattgcaggtattcgtctatggacaagtcgtttaattttcatgattctgactattttatttatgcatatggatggcatacagaatcaaaaaccctgctcattgaaacaggcactggagagcagaattcttgtttcagcacttgtaacttttgtcaccttgaacaagatagtgaaattttctgaggctcaatttcctcacctttaaaaggggactagtaatacattctcggctcaccttacaaggtttccattggaaggactaaataagctgacataagttaaagtgctttgtgaaatgtagagtttatacaaatgtgagtgattattatgcaaatgatgagaggatgtatccgagctctaaaaagagcaggtgtatctatgtaagtaggttagttgtctcttttaaaaaatgaggctcctggcaatcctatcagcaaggggctggagatttgcatttgacagcaacctgaaaacaattcaacatcagaaaatttactttcacaaaggaatccggaaaaaaagaaaagtatgaaaaccactgataggagttgacctaactactaaaaatctgtctaatgtttcttctcttgaagatattattgatgcaaaagcaaagtaaacaaaaatgaaactaaactctcactgcaaaatattctcataggttttttctttttttcccccacaaatatctcctattttgaacattctgcatgctttttttttttttcaatactgcatgcctggaatgtgtgtactgtagaatcaaacaagtttttcagatttgtctttaaaagctcgggggcaaatttttagaaaatatataatgtagaagaaacacaatgagaaaaaaatttcctgaagttaggctttcacatgaaagcttactaaggaatactactactcctaaacacgcagacagtcttcttgtattgccatttagatctatcattctgattgatcactgtgtagttggctattattgggcctaatttaaccctatacactcacacatccatctactctgtctattgtacctgacattctacaaattacttactcatgcaaatgacgacctaaggcaaccttttaggatattcgtgtttaattatacaaatggttcttgataaataagattatacatcgttccatatgtttattccctccttgatgaaaggaaatttaattttcatgcagatttggtggggacaatgtttaagaattgctgagttttttgtagtctgcagatccatccagtctgcagaagctgacaaaatcactccacttcccacacagagatgagcagttttttcattaggcttaaatcaacgtgctgcattctgaaatcctaaacggccccctttgtgttcacatggtcaaaggcaaaaggcaaaaaataaaaataaaaaaggaacagcctgctctccttgctctcctgtgtgattacaaggttgcaagatcaaagtttatctcttcctgttgtgtttagttgcttttggttgccaatttcgttttttttcctttcttttttttttttttttcccagccttagggtatcttgcttttgacagtcttgttgatttctctttggaggtctgggcagtgaattctgcaggaaaagcccccagtagctggacatggtgcagaaccgggccagccccaccagaaggtctcagagcccccacgttccatgtgatctcttctacccaagcagtggtcaacatcagtgcccctgggaagcccaacgggatcgtcagtctctacaggctgttctccagcagcgcccatggggctgagacagtggtgagcagcagagctaaaaatccaggactggttgacttttaaaaatcattactatgaaacctttgtttttatgtttttgtttttccctccatctttcttatccttctgttctcagttgctctacggtgaacttagtagcacaaatatccctcagagaagaaaaagtgaaccctgaggaaacatacagaaagtatgtaaactcttagggagagggatgctaaaggtggtattaaagactccacaaacgtaagaaactaagactttaaaggcaatcacactaatttaatttaatttaatttaattagaaaacagatcaaccacttagagtggtggcacatagtaagaagttggcaaatggtaattattggtggtgtaaatgttagtatgaaaacaaaatagagcaaagaatatccttggaatctctattttgacatgcacaaatctctaataatacatggaaaactctcattcctctggtgatttcaagaaagttctaaccctttagaagagagagcagagcagctccatcagcatagccctagctccactgtttgttcgttaacacgtttgaggcacactgggagacaggagagattgctcagggaaatcatctttcacattgtgcgttagccaagccacttcccggaagcgatgctaagaatcaactagaccagttcctgcattatttaaatgaagataccagcagccagcacgatgaagactcttgtctctgtggtatagcttgtgtcactctcaagtttctcatgaataagtggagattataatactttgttcacacaaacattgtatagagattgtgcagatcctggtattacactatgcattatttaggccaatttagggaacaatttgggcaagtgtggagaattcctctgagaccagagtgtcaggtattgaaacacaatttcaacagataacttacatacagggaggcttggattgaatgttaaaggaatattagcatattttctatagggcttcgtactcaataaatatagatgatgtaaatacaatcaacccttgattatccatgcttataaaatgataataaactaaaataatttatatttggagggcattgtatgcattttttaacagctcttcttaatcatatgttctttatgtcaacatgaacattaatttcagtttctgaactcttgttccgaagagtacttattaaaaccacaatgaggttaaaaatttgctcaaaataaaccaaaactttataatcctacaaagatgattgagagaagactatgatattttgtaaaaaccaacaccctcagaggaagagatagactttcaagccctccaatacttatacctgattttaatgtagatctgaaaagattttttgactgagaaattgcatgcaagtaaccatggcagaatatggaccttggtgaatgctgactagacatataattggaaggcagattttgttttttgaaaagacatcactctgagggtcatagactttgatcaacactttgtgtgttccgtgccattttctaatacctttctaaggtaatagataatcgataatattatgccttgtgatttccatcctgctacctcaaacgtctatttaacggttacattatcagatttttcacctatttgtcatacctctctaactgagttggtaattttttgaggataaatgtcatgctaaatgccatgttgtgtctcccagagtgcctggcatggtactccatttgtaggaggtgggatcttggataacattcatcaaacacctttaatgtttgacactgcctttatctagccttccttccttccacagctatccgaaggcatggccacccagcagactctccatggccttcaagccttcactaactactctattggagtagaggcctgcacctgcttcaactgttgcagcaaaggaccgacagctgaactgagaacccatcctgccccaccctcaggactgtcctctccacaaatcgggacgctggcctcaaggacggcctccttccggtggagtccccccatgttccccaatggtgtcattcacaggtaatgggtcaggcagaaggatgaagaaactaacaaggcatgtgtacagacatatgaactcatggtatagcctactctgcacctaggctacaaacctgtatagctacctggcactccccagggaggacttgcttattgaacagatatctatagcaaagtagacaaacaaattgatttgagtggtaatgttacctgcgatgtatttaaatcataaaagcaactaatgatagaaaggagaacaacgaaatgttttacattaaaaagacaatgcaatgtgttcgtattcaatatgctcttcctaatggttatctggaagcattccttctaccagccttcactggaacataagatacctccacagttaaatcagaattgccctgatctaatttaaaatattgtcataaaccactgtttgaaaggaaaaagaagacacttgactcaaaatcatttagaaaaaaaattatttactctaaaaagagaagaaccatttatgtctctcctcttaaaagagggaaatgtcttatctctaccaaaaaggatcactagttgctgggtaaacagcaatgtgtgtgtagatggtgacttctcttatcatttctctggttacatctgctgctcgtttccaatagcattacataaggtgtttctgagagcagtttcctgcaaatggaaattttaaagagcctgtagctctgtgaaaacaaaatgtctcctcacaaaatagaactggttttaaaagagagagttaaactaattccattacccgtcttgactctacgtatccattctcattttagctatgaactccaattccacgtggcttgccctcctgactcagccctcccctgtactcccagccaaatagaaacaaagtacacggggctggggcagaaagccagccttgggggtctccagccctacaccacatacaagctgagagtggtggcacacaacgaggtgggcagtacggcttccgagtggatcagtttcaccacccaaaaagaatgtgagtataagtggctgctaccataagccagagagattggaatgtggtcaggagaagcttgccctgaaactcggagaagccacttttaaaaacagattgagtgggctcaataacactgaatgttactgaagcattgatgaggatgactactgaggaaaaatgcctactggatttaataatatggaagtcaagggaaaatttaagaaggattttcttgtggggatagggtaaaaataaatttaggggaagttaaacgatcaatgggaagaaagaaaatgaacaaacactggtagaccatttttataagaagttttgctactccttttctttgtaaattacatggcataatctctagtatgtccagagagcattgagacatagcactattaggaaaagcaaaagggcaagtgagtgaaggaaagagcaatcaactaattaattgggggcttccttacatttttatataatacagtcacgcatcgcttaacgatggaaatatgttctgagaaatgcatcgttaggcgagtgtcgtgaaaatatcatagaatgtacttgcacagacctacatgttataacctactctgccccataggcatgtgactgtgctgaatactgcaggcaattgtaacacaatggttatttgtgtatctaaacatagaaaaggcacagaaaaaatctgatataaaagataagagggccaggcacagtggctcacgcctgtaatcccagcactttgggaggccaaggcgggtgaatcacctcaggtcaggagttcgagaccagcctgaccaacatggtgaaaccccatctctactaaaaatacaaaaattagccaggcatggtgacacatacctgtaatcccagctactcaggaggcttaagcaggagaatcactttaacccaggaggcagaggttgtagtgagccgagatcacgccactgtactccagcctgggcaacagagcaagactccttctcaaaaaaaaacaaaaaatgtaagagatggtacagggcagctccattataatcttatggaaccaccatcatttctgcagtcttgctcaaaatgtcattatgagatatatgactataacttagattttataaggtatatgctttcattgtttaataatggcaaacacaaaaagtattaagaataataagtgcttatcagaaccaactgcataatttatggagtccagtggaaaatgaaaatatggaatcctttgctgaaaaatctttaagaattccaagacagtaacagtacagcatcaggctaagtccaagactcttctatgtcacaggcccttgcaacagcacaggtcacatgccaaggaagctggtccagcttattataccccaacccagaggcaaccactactaatattttggcataatcaattcttttaatctcctttctatgggtaatttttactatatggctgaaatactataactaaaatttcatagtcagctttttatacttgacgttattgtatttgcatttcccgtggcattaaaaaaactctttagccaccaattttaatggctatacaatattccatatataaattaattgggacattttgttttttttttaatttcccattaataaatatgatgaaaaaatctttgtgaacagatctttgaatgtctggttatcttcttaaattaaattttgacaaatagaatttgctattaatacatcaagtattttaatattttaaggctttggatactagtttcatgtttgctttcaagaaagattatgtcagattataaatcttacctaaaatactctatctggcattgaatatgatgccaattttaaaagcaagaattacgcattcataaagaccaatgtctcacacaaggagcttaatgtgtctgagcaacaacatggtaggatgttagtaacagatcacatttacagaggacttgtttgttcctggcagtattttagcattttacaaataattcttacaacagacctattattatccaaatttacagatgaaaaaactgaggcagaactataaactgtgtactgcgattccaggatgccattcatatagactatgatctgaactgaggctcttggagttagacagtgacgtggccctaaactaaggccagagcttaagtaacctggccagtttccacatctagtaagtgcagtaattactctgaactcatggtcactgagctcagctgctgtctcagtactactctttccctgatcaattcatttcctactctctgtaatcaagacttcaaaccatctccaccttcgccaaacctccctctgccgctcaccctttctcccttcatgcccacaacccagctcacccatttctccctttattctctgcagaactccttgtcttgtaattttccaggaaaagagatgtcttcagtcagtaatttgctccacttcccactgcagacaaagctacctgcatataccccattgctgtcagtgacaaggaaagggtggtccttcttccgtctgaaataaacctgccttccatgcagtgaacttcatccacttcattactcaccatcccttctctctccttaatctttctgtgtatctcactttgattcaaagttccttctacccttctaatgttaaagcaaacaagctcctcttcccctgcagtgatgtggactctactctctctgacagcaaaactttcctgaggaacggtctgcagatgctttgcccatatcctctcttccacttactctttaacttcctcagcactggatgaaaatccctttctaagtttgcctttggcctccatactgatatatccagaaggcatgtttctccaggagtcaccttcactgactttccagtagcattcaacgcaactgaactttcaatgttcaatccttttttaaaaagtggtttaccctcattttcattaccaccctctcctggtttctcctctacttctttggattttcatttttagtcaactttgttggttgatcttcttccgctgcccaaatcttaatcctaaacattttaactttgtccccttgccgtttctctactccctcctttcctcctccctcatcaggtgagttcatctgctccaaggctttggttccaaaagccaaactccagtggtcacctcctagtcaagtgctctgttttgaagtgtatacccctccacccagattcctcacagacatctccctctgaatttctcataaccagcttacattggacaggccccagacagagcttgcaactttccccttcaagctatgcttcctttagtcctcactttctccattttcatctccagcactgggcacagtatcttagattccaatcaatgttgtttaatgaataagcgagtgcacctaacactgcatgtttattgttgacactgctcaatcagcattttttgtcacccatactatattcaaagcaaactgtaatgattcttaatgtgtgctgtctgattttgtaatctcctttgcactacatccagaagccaattttgctaaatgttgcagttttttggttgatgtggccagaaagccagagaacagctaggtgagctttgtaatttataaccaattcccttttgagtcatgaagcttagcttttgccagaattttttttttcttatgcttggaagaacaaagtgaactgatttaagattttcttcctgtggccaggcacactggctcacacttgtaatcccagcgctttgggaagccaatgggggaggattgcttgaggctaagagttcacgaccagcctgggcaacatatcaagacacctatctctacaaaaattttttttttaaatagccaggtatggtgacatgcgcctgtagtcccagctactcagaagactgaggcaggaggattgcttgagtcctggaagtcaaggctgcagtgagctgtgatcatgtcactgcactccaaccttggcaacagagcaagacttggtctttaagaaaaaaaaaaaaaggattttatctatttgtgtttttttatattggagaagcagcttaaacctggactagcaccataggagaagaggttcccttaatccactactgggtcaatagttacggaaaaatacaagaaatgactatgatacaggttctaaaataccacttatgctacttttaactcattataaatactgggagcacgaaaacatgcaccagagaatacaaaccagaaaataatttggggcctggtgtggtgtctcacgcctgtaatctcagcactttgggaggcagaggtgggcagatcacttgacgtcaggagtttgagacgagcctggccagcatggtgaaaccccatctctactaaaaatccaaaaaaattagctgagtgtggtggcacacacctgtaatctcagctacttgggaggccgagtagtgagaatcacttgaacctgggaggcggaggttgcagtgagccgagatagcgccactgcactctagcctgggcaacagagcaagagtccaactcaaaatagtaaccataataatttaaaaatagaatatgcagttttatatagatgtgatcacatgtacactcagcaacgggtctggagaagaagcctaacaacacatttagttccctctgcttgaatcccccttcagtggagagagaggtgaggtgtaaatgtttaacagctggcctgcttgagggaaaaatggcctgatttgaagtgcttatcagtttccatggtgtgaatacccccattactgctctcaagtgaccaacatgacagcactgaacagagttaggaagggatgggttgtagcgtatcattatataatatttccaccagccagatagagtggatgtaaatgacctcgagcacacagacggtagtaaaatgtagtgaaacaaataaaaagttatgaatttggagtatttataagctttgttttaatataatttatttaagtttatataatttaatttttagtagtggccggatttaacaatgactcacaaaattcctgaatatttaacagttggggtgagccaacttcagcacaccactggagagcacccatagggtgaattggtaaattctgttcttttcaacaaatgtgtaccgatgataacaaagtagcatgggccttatttaagcaagcctaggttcagctccttggtctcctaccagccactgacatagagcaagatatttgacctctctgaacctgagttttctcaccccaaaaattaggaatcaatctttacaggattattttgaggattaaatgagataaagtatgtcaaaagctaggagcgtagtggtacttacagctttttcagtcttccttggggaggatttgtaaactcattattctcgattattttaattgcttactctttttcctcaggaaggtctccaaaccctacaggacaaataagactcctatctttctattttcttgctagttacaagctgtttctttatctgtgctgttatgatatagggaaaaagtgaaaatctactgaactaaggtgatggagagaagtcatagacaaataacaatagagtattccttgtgatatcaggcagaatcaatgttggaaaagcattgagatttaaagagggcttgataactcttgttttggtgtttgcagaaaatttttcttatggctttatgaaaatatcttattttgaaagataacaatcaactgtgtctttacggttgaatattacaattacaaaagcataattattccttattttgttatatttcctaacatcagaaatagatggattgatttttaaagaaaaagaatcagattcaatttagtctcactactcactcctttcttttcttaaaagccaatttggtatataggtgaatcttaatgtttttacaaatatattgattattttgtagaaaataagatctcatgaaataaatctcttctgacttgacaagatgacatggtatcccttcatttgtttccacaaaaattattcatttaaaaggtgagccccagttaaggattttctttttgttttagtaaggaactgaaaaatcaagagaatgtgcctgtgaaatgcacacaaagttgcttctatatgtgatataatacttaggacacctgagcttgattatatactaatgtactatgctattgattgattagtcagggccatgaattattatacttgaattactgtttgcaaggctttttaactatcttagaaaacaaactaacagtttgagaaaaagctttaacaataaatgggtgccaaaaggacgtaattcaccatctaagcagtttggtttggagaaaaaaatatattaacttcatctagtccttggggctttgtggcaataaatattgatttgatatgaaaaatagctatctactgtacttaatagtattaaggatactttacctgttaaaaagagggaaaatgcaacaaaatatgagctccagggttatgctggtgagcagatccattgtatgttaatagttttatttataaaacaccactctctatcgattttttttaaagcaggcataaagttgctgagaaagcatttcacacatgttcccattggttttcttttcacccctgatactggttgtttcgtaatactgaggaaaaagtgaaggattctagcaatgttggttttcttttttttttttttttttgtttggattggttcggtttgattttgctcatattttttttttttaaagtgcacacctgcactccttcaaagaggttaccctttttagaacatacaactttctccccacagtgcctcagtaccgagccccattttcggtggacagcaatttgtctgtggtgtgtgtgaactggagtgacaccttcctcctgaacggccaactgaaggagtacgtgttaaccgacggagggcgacgcgtgtacagcggcttggacaccaccctctacataccgagaacggcggacaaaagttagtttctgactcctgtttctcagtgtggaaggcgctctgttccccagctttacgggatgctaaatctgaaagctgaccagcagatgctcaccattaaaatgtcttggtttaagtgcccccttcttgtgaaaaagttactgctcaggataaataaggttttctttccttcccatttgcagcttgacagcactgcagttataatgcagttcaaggggacagcgctgcctccacaggactggagggtccccaggaagggataagacccaagggccagttgggttcacaaaagaaatagcacccatacatagtcaatgactaccctaaaataatacacttctagcaacttcatagattttcttgctgtatctccagtctccaaacagagccctatcaggaaataactatctccaactcatgaggacctgaataaggggtttccttaaccttccttgatatcagcccctgaaagaacaatcttgaccctctaaaatggagttccttcttcctgtttacttacatgtcccttttctccttgccttgtttttaaattgaaatgagaaaatgctttacaaggtgctaagtattttatagtgatcagcatgctcacaggaccaatgttcactatataatgaattgattaatgagtattttattttggctgtaaggtagaggtaaacagtgagctccagcattgcatgtatagtaatagaaacttaataacatttttacaaagattcagctacacatgttcattgttacagttcatggtcacctgggcagctctttgggaaaggaaggtggcctgatggttgggagacacaggttctacctggccaggcctataaccatctgtgtgaccttgcaagggtcacttccctcaggttcctggccattggaagagcaatttagaccatgtgatttctaggatcccttttgagctctcctgttcagtaagaaactctaggtcatttagtggaaagtacacctgtaaattttaaaggaaggatttaaaccgtgtgcagaacaagatgcgctttgtgtattaccctttactcgtctgatgttcttttcctttgctgtataagctctaattttccttagctctattacttatggataggctattattacactaatgatagctttttttcttaaacattttaaaattagaagtaattttgaatattatataaaacgtcataacttgctttggaatcctatttttcatgctatgatgcattgctcttttaaaagcatgtgccctatttgtaggtgttgaatgaacaagtcatttaccagttcttccttttgtctagccttctttttccaggtcatctgcacgactgacgaaggaagtgttaagacgccgttgatccaatatgatacctctactggacttggtaaacaactcatattatacttggcgtagcacctattcatcttcctcaagaaacacacatatgtttgtttatacatacttggagtcctaatatattagcatagactatacagaagaaattgtgccaagtgttgtcagagtttttttttttgttttttttttgttgttgtttttttttgagacggagtcttgctctgtcactcaggctggagtgcagtggtgcaatcttggctcactgaaacctccacctcctgggttcaagcgattctcctgcctcagcctcccgagtagctgggattacaggcacgggccaccacacctggctaactttttgtatttttagtagagacatggtttcaccttgttagccaggctggtctggatctcctgacctcgtgatctgcctgccttggcctcccaaagtgctaggattacaggcatgagccactgtgcccagccagaaattttttaaaaagtcctcatggaacttatatcaggcaaggagttacaatacactctttttttttttttttttttgagacagagtcttactctgttgcccaggctggagtgcagtggtgcaatctcagctcactgcagcctctagctccaggttcaagcgattctcctgcctcagcctcctgagtagctgggactacaagtgtatgtcaccacgcctggctgattcttgtatttacagtagagatggggtttcactttgttggccagggaggtctcgaactcctgaccacaggtgatccacccaccttggcctcccaaagtgttggaattacaggcgtgagccactgcacctggccagaatgtactcttaaaatgccaaatattgaattgtaaatatggaaaagaccagagagctcaaactaaatttttctcctaaccacaaaccctgtcaataaagaattgtatgacttcgcgtgcataaaggtgatttacagaggaagttagaggagagatcagaagaagaaagaaaatattcagccaattcatgttgatcataatgttaatattctagattcaaagcctagaatgataaatttggaaagtgtcttttattctccataaaagattatgattgactgttgatatcgggtaatttagctcaacgggtacaattttaatttttaaggagcatcttttaaactgagttttactcatagtctctgaatctaaatttgtgatactttataaaagcaaattagagaaatgccaaatcttttccactaaaacagattcgggattgatatcctattttaaattccagtaattaatgatatatcaaatttgcatgtatagagtttttttttgaaaaataaacatgtccaaaatttctgaaacacaatttaaaaaaaaaattttttttaatttttttgagacagagtctcatacatgatgaaacatgtatattattgtcaaggatagtttcaatttgtaaaaataacgtattattctatgtttccaaactttacatgtctggatgtcatataaaatttcctacaacacttaattcttctcatacggcttatttcatttaatagcagtggtaggatagaacagatctcatttagtattctgttagcaactccaatatttccccaagtggacaagtggaggtataagggacacaggaatttatccaggaatgctctgctagcttgttactgggatgagaacaccaacacagattttctattgacttctggcctgggactttttctttgcaatggtttgccaagttaagtacgcataggaatcacctcatgtgcttgtttattgtagtttcccgggcctctggcagagattcagactcaaggaggctcagaatctgctctttaaataagtcctgtccagtgattctgacacagggctcagaaccacgtgttgagtgatgccggaaaaccaaggttgctcgccttctaagccctgccagtctagtttccttggtgaatgggaagtgtgttgttcctggaggcaggccatcaacagagacggatttactctgacactggctgtggtttcggttttctttggatctgaggcccagccaccagagtttcaaaccctgacagtgaacctcccatgtgatgcacaggtagagtcccttaaggtgaaggggtacttcaaaaagacagaagggaagggataaagggacaccatcctgatctcgaggtcttcataaaaaggagaaatcccccgttggctcatgaatacgaattgaggtttccactgtgtctggaggccgggctttgggtagagcagaggggaagaactctgaggattgtgcaatgctctggcagattccaagatgtgctgcccaactaatatccatcgtcagttctaattttcatgatgtaacttttttaaaaacattcctgttcccttgcctgaaggcagcctccaagcaggagagtggcagagacctcattttcctctgactgttctaagggctatttcccttttgaggcttccctcgggcaggctgccctcccttcccctgcgtgctgtggagcaaggggcccactgggcccatcagatcagtttctggagttacagccaacaagttgttttctctctgtgccacacacagaggaaacaactcttttagtgtgcaacctaggctggtttgtttttaatcaaacaacacacattggttcctaattaggggaatttcgacctgctggagcttgattggagtgttgactcaaccctttattttagagatgagaagcaaaggtcagagtccaacatttaatcacagagctgatcggcagcagagttagggttggcaaagtaatatccctcctcttacggagttcaaagtttagttttagtcaccatctgttcctgcctttaatagtttcaccccagttctgaacttttttcctttaagtctttccctgctagtgtgagtgtgaagtaccacgcaggcccatggagttctagaggtgttgaaaagggggagatttgtccagtgagtgagtgggctttgcagttgtgtctgcttgttcttctgacctggctgtgggtattagatttagatgagcagctctctggctcacatctccacaccagcctgtgtggccgctgcatcagatccacaggtttctgtgctggccccagcagtggctggatgggagcagatctctggccaccccacccccacccctgccgcacccctgcttagcttgccaagctgacaacataatttcactgccttcgcctatcctgcatgattcttgtcagcctctctcctatcttccccacaagacttaataaacctgcctggctgggtgcggcggctcatgcctgtaatcccagcatgttggaaggccgaggcaggcggatcatgaggtcgtgagattgagaccatcctggccaacatggtgaaaccccatctctactaaaaatacaaaaattagccaggcatagtggcgcacacctgtaatcccagctacttgggaggctgaggcaggagaatcacttgaacccaagaggcagaggttgcagtgagcggagatcacaccactgcactccaacctgggtgacagagcaagactccatctcaaaaaataaataaataaataaataaataaataaataaataaaaataatcctacccacccttcatccctgtaaagctctaagcataggacctggcaccaggtacattcttgttaaatgtgagctacttttattaatactaacttcatgtgcagagactcacaccaactgaactctcaatgtgtgaacgccaagcaaaggtaagtggctccagtgctaaaagatttctttccataggaagctttcccagtgcatttgggtgatggtttgctgagctttgctctttaacagagaggccatgtaaagacaacatggtagcaaacacaggctgttaatatcataatggaaaatggaatctgatgcttcaaaatccagtttgcacgaagtatcaggaattggactgttgcatgaagcaagtacacctcagatctccaaggagtgattttgtttgtgactctgcagcaataatagtaagggtcccagtccctcatgagaatccaagcaaggactttgctcccaagacacacagctatgaaacaggtgaccctcaaggttactttggtaacctcttttaaaaattgctccccacactcccatctttcccagggatttgtcaagacagtggtgatttccaacctgagcagcagcgccagaagtgtcagcaaggcctctcaagggctgtaagcatctcgttataacccagcaacctgctgaaccattaccccaggctgcacacaagtgcaaacaagcagtaagagacaaactgctttctgctttcaactcctctctaatttactatcaaatagcagggccagagatgacaaaaatgctttctgaaataacatttcccctttctttctctgggttttgcaggcttggtcctaacaactcctgggaaaaagaagggatcgcggagcaaaagcacagagttctacagcgagctgtggttcatagtgttaatggcgatgctgggcttgatcttgttggccatttttctgtccctgatactacaaagaaaaatccacaaagagccatatatcagagaaagacctcccttggtacctcttcagaagaggatgtctccattgaatgtttacccaccgggggaaaaccatatggtatgtttgtagaggtgtggccccatttccctatcactggactagaatacttgttttccttctgagaaaaatgtgtcatagccatggtaacaaggaattagatgtaagttatgtttcactaagtgtggggaccaagagaggctaaccctagaacagctttctcaactttggctgcacattagaatcacctggaaagctttaaaaaatatcactgcctggacttcatccgagaaattctcatatccttggtcttgagtagggcctgaagattggtattcttttcttcactccaaaactgattttaatgtgtaactagggatgagtatctctgccctgtaattgtaagccagggcctggtggagaagagttgtatgttgagattacctggggaaattataggttgtattactgtgtaatttggtggcggggaatgaacattaaaaggcggagatggggaggaaggggctacagtgctagtggtgctcggtctgtcctctggtcctgacaccctgtgccacagaggatggatggctcctcttagctatagaccactcactcccaaaataggaggtccagtaaaggtctagtgggagagggccccatcacttggtattacaggacagtcattgcccagagcactcattgaagggtaaaaggtgatttaattccatggtgcagtctggtgtggggctatgtctacctggaggaggaaaggctgcgttttctaatcctcatcaggtacccatctgttcaccaaagctgggcgcccacagggctacgtctccctgaggaggtgccttttttccagtttgcactaaggttctatattagctagtggctaccctaggcagtactaaaattaagcacagaagcctggtcaagctgcttacacttcaacatttaaaaaaacagcagtgagtgaacacagcagcaccatctgccttccagatctcttcacttttccagcactcagcaatgaatgaccactggttaagccccaacatagctggatcagacctaagtagcaggagtgttgggagcacaaaagggcagtgggccctccgaggtccacggtttgtggtttttgtgggaagtagcaatgggacaatgacgtggtggtggagaagcaaagaaggcactgcccaacaccatcagggccttggctctctactcacatctgtcccactcctctactcactcatcctcctcggagcctccttcctccctgagcccatcagacaagctctaaccacagggccattactgctgctgctccttgggtggctcacactcttgcttcattcacatctctgcacaaatgtcacctcccattctatgtaaaatttcctagccccttaacccacttcttttcttttctatagcatttaccacataacactaagtcagatatgtttgtctgactcctgaaatagaaggtaagctcccaggatcaatgatcttgtgggcctcttcctgttgtatgtgccccgggacccagaacggtgcctggcatatcataggcactccacgaatgtttgttgaatgaatgaatgtcgagtgatcacttcgaaccatgggctgtttgctcctgttcagtgaatagtcattaggagattctcactgaagagcagatatttcaaaatttttccttgttaaagaataactttctttaaggagcccatgttcctagaaggtgcactgctgctggaggaaggcagtggaagagagaaaagaaggcaggagagatctgtttagcctgggagatgagctaaactgaaactagggtctatggagtgcatggagtggtgaaagggaggttcccaagcactgctaggcacatctactgtataatgtgaggtgcggttacaggaaagtgtacccacataccagcaatgtccagaagtcatttcagtgatactttctcctgtcctttgacccagtccctataggcaggcacctctgtgtcagaatcctccatgaggaagaacactgtcttccttacttggttaacttagtgaccagaagacactcccatcattcttgtggagatgttatgttactctggatataaccccattgctcagggttttaatgagtcttgttaagcttcgttttgtcaaagtgaggaccatgaactatctgcatcagcatcacataggaggagcaggacctgaagttctgagggagaaactcaataatctgccattttaaccagaacctcaagaagtctgggccaggctcggtggctcacacctgtaatcccagcactttgggaggttgaggcaggagaatggtgtgaacccaggaggcagagcttgcagtgaaccgagatcacgccactgtactccagcctggacaacagagcgagactccgtcacaaaacaaaacaaaacaaaacaaaacaaaaaaagaagtctgatgcacagcaagatttgagaacagctgaaaatgaaataataatataatacaaaacctgtatgcagtgtactgtttgataaccagtagaaacaggtggtgggagggtgctggttagaccttgctgtcctgacaccacacaggctaagccgcctctggggacagacttaggcttcagctgagaaaagcggacaaaagaatgtaaacaccctgttcctgcacaccctttaccatcggggaaatgcacagtggcacccaactgattctttcactgagtggccaagactgagtcaggtgtgaggatgggaaggcatagagggactggctggctgccaggggctctgggcccagggaactggctcatcctcagcagggaagccattcattgcaggcaggtctcagcagaagtgaaatctgggatacaccagggcaccgggtggaattcccctgagcctgttgaatcataatttaatcctatccagttgacagtgtatttgcaagtcttcttctgttgctttttacaaatatttttaaaccaaactgctctcacaaagttggagaccatgagagacattgtcaaaaattagccaaactaaagagagtacaatttgtattagtagagcaaaatgaagtccctgttggtgactgtgggctcctcatctactcaggtgggaaagaatccagtcaaggggaagaatctgaataggaacaagccagattcacctgctcagttttccagattgactgtcttttcacttgagtaggtcaatgagctatgcccctgcaacacccacccacacacacacacacacacacttctccccctcatgtgacaagctctggtttcagtgctgctgtgaccctcttccaagcacccgtcttgtgaacaggtaagataccctttgaacatcagacccaaactggcaaaaggattttaggctatactctgaatggagagaaataggcagaggtgccaaggaatgagagtgtcttttgtatttcatcaacatttttcaagaccatacagtatacagtatagctaagtttaagttttgcttgttatttaattactggtttgaagatcctttcattccctgcaatactaaacaaatactggcagtggtacttaccttagacactaatcaattaatttccactcaccaaggtttttttttttttaatttgtttgtttttgagacagagtcttctgtcatccagactggagtgcagtggcatgatctcgactcactgcaacctccagctcctgggttcaagcgattctcctgcctcagcctcctgagtaactgggactacaggcgcccgccaccatgcctggctaatttttgtatttttagtagagacggggtttcaccatgttggccaggttggtctcgaactcctgacctcaaatgatccacccgtcttggcctcccaaattgctgggattacaggcatgagccaccgcacccggcctcactatgaagttttagttgcaaaacccaactttctctctctcatatatatatatatatatatatatatatatatatatatatatatacacacacacatacacatacatatatattcacatatatatgtatatatacacacacacatatatatacacacacatatatacatatgcaggtatgtatcctaggatatatatgtacatcagagcagtattaaatatgggtatgataatgctgtcattggagaaatgcaaggaatgtgtttaaaactgttccaaacatggactgatgctgccatttgttctcagtttgactctgtggctgatatatctgatgtgtcaagcaatgtcaccctaaaaagttacaccatgcactttgaggtacctctgtgtgctgcatgaatgcatgatcttttgcatggtgtgttgactgcacagtgaaaagcaggaacagatcattgatgacttccatatatccattccttggaaagctgaacaacatgagtgaaaactctactgaaaaaagaaaagaaatgggaggccgaggcgggcggatcacaaggtcaggagatcgagaccatcctggctaacacggtgaaaccccgtctctactaaaaataccaaaaattagccgggcatggtggcgggcgcctgtagtcccagctactcgggaggctgaggcaggagaatggcgtgaacccgggaggcggagcttgcagtgagccgagattgcaccactgcactccagcctgggcgaaagagcaaaactctgtctcaaaaaaaaaaaaaaaaaaaagaaaagaaaagaaaaagcagaaacatttcattgattggaccagctaaatcagagccctcagatatttagagcaactatagtttatcttacggcgcgttctaggtctaaattatgtagtgactttttctctctgatgttaatatcagacctgatgtaatttggaggctggaatcctataagaaatggaggaatatggaatgagaaatgagggagggaggagtcaatttccctacacaaatccaggacttttaaagtgaaagacaaacggagctcacatagtggaccaccatgaaataatattgttatctttggctgttctgggggaggagtgttctcaagagggaggctctgtgctgacatgtatgaagaagataccttgttcacccatcatccgtctgccttgccccaccactttgcaatgcagcaagcccttgccccacagggaacaacagccagagcaccagtgcatgagctctctaggtgccgaaaacactggccacctaacttgagtattagctcatcatctcatccttcttaccaagaaacccagggtcaccgtgttgtgggtgctcatagctgctaaattctgtaggtgacagttgttcccttcattgacaatgtgacaattgtcaggagacagtcattcccttcactgacaatgtgtgagacacaattctctgtcatatttcaagcccatattctttatatgtgaaatactcacagcaacttccttctcaggggttagccgataccaaaattccccggtctgggacacctgtgagtatccgcagcaaccggagtgcatgtgtcctgcgcatcccgagtcaaaaccaaaccagcctaacctactcccagggttctcttcaccgcagcgtcagccagctcatggacattcaagacaagaaagtcttgatggacaactcactgtgggaagccatcatgggccacaacagtggactggtgagttggtttcctcatacagggcctttgctaaatatcccagaaaaaatattggtacagagctgcctgtacttcaccgaatgctgccccatggcactcgcctctgagcacttagccagtgaggtagtaacaaccggtttactaatgttacttcagttgtttgataagcagggtagaaactttgtcttgttcttctggtatgcaatagatgcttaaaaataaatgcttattggctagccgtggtggctcatgcctgtaatcccagcacttggggaggccgaggtgggcggatcacctgaggacaggagtttgagaccagcctggccaacatggtgaaaccctgtctgtactaaaaatacaaaaattagccaggtgtggtggtgggcacctgtaatcccagctactaggggggctgaggcaggagaattgcttgaacccaggaggtggaggttgcagtgagccgagaccgcgccactgcactccagcctgggtgacagagactccatctcaaaataaataaataaataagcagcaaacaggttatacttcatatacttggagcagatgacaggaaacattggaatgggcctaaaacaaggcataaaatacaagcacttgttttactaaaacaaaaaggtactttttttgttttgccttttcctattggtgtatgggtagacgcaaaaagaatattttgtatcaacaggtgaacatggttgctttccaaaaccttaggaaatgatgacaaatgagggtgttactatttataagcttcatctttcataatttcagtccagtgggtacaaatcattggctctttgaaaggtaacctcttcgtgatataacatttattatcagtctctgagcggctacaataacaaaaatcctagaatttttgccaactatcaaatttcattgtgctaacttcctagatgcccgctgcagtacctaccattccactgggcctgttagaaaataaacagataggccaggcacagtggcttacgcctgtaatcccagcattttgggaggccgaggtgggcggatcacgaggtccagagttagatagagaccagcctgaccaacatggtgaaacctcgtctctaccaaaaatacaaaaattagctgggcgcggtggtgcgcacctgtaatcccagctactcaggaggctgaggcaggagaattgcttgaacctgggaggtggaagttgcagtgagctgagatggccccactgcactccagcctgggtgacagagcaagactctgaaaaaagaaaaaaaggaaaaaaggaaggaaggaaggaaggaaagaaggaaggaaggaaggaaagaaggaaggaaggaaggaaggaaggaaggaaggaaggaaggaaggaaggaaggaaggaaggaaggaaggaaggaaggaaggaaggaaggaaggaaggaaagaaggaagggagggagggagggagagaaagaaaagaaaagaaacataaccagctaggaagttagctcctgtgtttactcctctggggtaaaattattcacctccacttctttcaatcatctgcttctgtttttggatttgctctcatctttctcctccaagttctcacttttccttcactgaaaagttgatgacttccatgaagcctttcttgactaatagcaaataataaagggagttcgctggacccaggttccctaacactatataaaaaaatgtaccatccttctggcctgttcagaatgattgtataatatatacatatatataatatgcattttaaaatcacaggctgtttgatgttgttgtaacctcaactacatgagtccatttcagatctaaagtttttaaaaggcagggataattatatttggttgaaacaatgaattgctaactgatcatttttgacatgcaaaacagcaattgctatacattcaacataatacattgaaagttcagatgaattattacatctaatcttcacaaactgtaggaagtaggttctattatcatcctcattttttacaaaaagaactgaggtttagagagatgagtgatttaatgagagattacacagctagcaattatttttatgggtttgggttcttaaaaacatcatctgactacagagctcctatttgtaactattatactgtattgtcatttttgcttgctttttacggtactaataatgggcaatgtgcaaagggactcaataacaagcttttgaaggtgccagtacttggcaagttatctgtttattataacattataaccaacattactaaccctatttgataaatacaaaatacagcacaagagtgggaagaaatggagcacaaatagctagcattctgcctcttccatttaccgtttgaactaaatccatatatatgtgtgtatatatatgtatatatacagatcaccagaggtcaggagttcaagaccagactggccaacatggtgaaaccccatctctactaaaaatactatatacatacatacatacatacatatatatatatagtgtatatatacactaaaatatatagtatatatatgtagtgtctatatagtgtgtatatatatactaaaaatatatatatatacccccagctaatttatttttatcaagtatatatgtacacacacacacatcccactctacagatgagtagactgaggcttctgaggcttaggttaaaatatgacacaatataaccctcaaatcacatatacattttgaattagtctatagttcatgtgtgcatgtgatgtgatcctttcaataagagaaatttaaggcaaggtctgttttagaccccaccatggtgttgagaataaaaaagcctttaatacttattactttttacacttaattgatataactataaattgatagcaaatactattgatagcaagtatgtagccaatgatgattggcttatttttcagtatgtggatgaagaggacctgatgaacgccatcaaggatttcagctcagtgactaaggaacgcaccacattcacagacacccacctgtaaaggatggaaacccagaagacgtaaccctggaatgcaaggtctgcacccatttcctcctgggttatcactcacacatcataaatgctgaaaagccattgtttattatcctataattctttaaagaaatgatgactgtttttgaaagtgttccttcctaatagaggtctaagaaatgatatttttctcatcttaaatgagagagaatattcatatgaaaatacttgatttgctcttattttgtagaagacaaagaagtatgtaattgtcacttggttctgtttggcagtgatgctcctggttaactgaataatcagtggcaatttcaagatggctcacagttgttagaagtagtaagttagttactggctcaaaaatgattctgttgaaaggatgtcactgctgttcatttctatctgccatttctgtcagggttgacacaatcctgcaagaatagttattctaatgatcacagctgctaaatgaatcccaaactttgcaccaggtcgacaaacttttctgaaggttctatttatttaccatacatagggttacttaccaaactttttgacaaggctgaaggttctatttatttacaatacatagggttactcaccaaactttttgacaaggcaacacataacttacacataaatgtctctgttcttgcatttatgaattttccaaaaatctaaggagtaaacagcttatttatacattttgaggagaaaacaaagtgtttcactaggaacacctctacttgaaccaatgtttttatttcatatattttatagttttgaaactagtttctcataaaattctgtcaattcactgaatatcagagaatactgacatcttcaacctagcacatttcaaatggaaactactgttctatttgcaatattaggctgcgtgaaattttaaaaggaaaaatgtatctgttccttctagcattaacatatatacatgtagagacaagactatacctatgtgtatatatatgtatatcatgtatatattactctgcactatatcccttctttttggagaactagccattattttagccacagaatcagtaagaacagatgatatgcaacagtaccaattacggttcaaaaatgtctgtcacctgctctagttggattacaaagtcattggtgaaagtcctatggcaagaaaaattttcttgcaaatcatccacataaaatcagatatttaaatttgttcttcatggaaaacagagtaagaaaacctcttgtcttccttcatccttaaaggtctttgtgaccccaggaaaatattgactctgtctaacacacaatagtcacaatactttttgtgaatctacaaccagagacaggcaaaaacttgtaaagtaagggatagtcttacttattctgcctgaaaacaatgtattaccccagggcccaacagtaaaagattgtggactttttgggtattgagatttcatctagctctgtgagagagcagctcctcagactgaccaactcctagacaaagtttgccaaccataagtgtcaaaagcacaggccagtattaagcagaagttctaccaccttattagaactgctataaacaaaagcatctgaaataattgtgcacatctggcagtgactgtagaaaatacgaaatatatatttctcgccaagtttttatactttctgaaatgaaaacataggattgactagtttactggtttttattcccatatgccgattctgggacaataaagttgtttaaagctggcacaaataagcattaaccaaggctgtgtccaccttctgtgagctacttaaggtatataggaaaggagtggtcacaaacttgcatcctaatccttggtggactcttctaagaatacagtttgctagtcacaaagaatagtctacaaatatgctttgctaggttcagaagattgagtttatcctgatttttgaaaaattaaccaggtatctttatcactgtgtatttttccaagcacagtataaaattttaacaacgcacaaaaaaatacagaactgcaggggattttatcttggatcattatccatttaatcatctaattagacatgaactcagttagctgaatcatttacattttgactccatagcttagggcagacagaagcctgtatggcttctgcccagaactctgtcccctgctacatgtctaagtttacttgtatttatttcagagaagaactctaagatgttgctttgctactttaagtggtattgcgtgccaagcctctattatacaaaccatgcagactcgcctctagagattctgattcggttgatctggggtgtgtggctgaggcatcagtactttttaaagcttccaggtgttctaatgttgagacccactgatgttccacaatctggaagaaatcatgtacaggaataatatgctatgcacagggactatgctccttggctcaccccttctcccttataaacaatgagcagttcttgatgaacctctttaaatttaaatctcctgactcacattttaccaattgtacatgccacattctcagcttacgaactaccatgttttgttattcttaatatcaactgtttggtaagagtacagttgtttttatacactctaagaaatgtgtttataatctactgtaatttccactaaatggaacccaaatattaatgttatggtaccatatactgatgtaaaaatcatgctggcatccatgaacacaccggtaaataaaacatagtccaagtggaagaattcattaataaggaacttttaattatgtcacaaatgaatagttggtttccaatgcacaaatatcatgtaaactaatctaaagatggtttgcttaataaatatttgaatgtgacc

SEQ ID NO: 2 - RNA, 20 nt, synthetic construct
  source 1..20: mol_type = other RNA
agagtaagattggcccccta

SEQ ID NO: 3 - RNA, 20 nt, synthetic construct
  source 1..20: mol_type = other RNA
ctcacaagcaatgccatagg

SEQ ID NO: 4 - RNA, 20 nt, synthetic construct
  source 1..20: mol_type = other RNA
taattataccttcgtgaagc

SEQ ID NO: 5 - RNA, 20 nt, synthetic construct
  source 1..20: mol_type = other RNA
tctcacaagcaatgccatag

SEQ ID NO: 6 - RNA, 20 nt, synthetic construct
  source 1..20: mol_type = other RNA
cttttttcccagcttcacga

SEQ ID NO: 7 - RNA, 20 nt, synthetic construct
  source 1..20: mol_type = other RNA
gttgtttctgttacatatgc

SEQ ID NO: 8 - RNA, 20 nt, synthetic construct
  source 1..20: mol_type = other RNA
aatataaatcatgctctcct

SEQ ID NO: 9 - RNA, 20 nt, synthetic construct
  source 1..20: mol_type = other RNA
ttctcacaagcaatgccata

SEQ ID NO: 10 - RNA, 20 nt, synthetic construct
  source 1..20: mol_type = other RNA
aacttatccagggcaatttt

SEQ ID NO: 11 - RNA, 20 nt, synthetic construct
  source 1..20: mol_type = other RNA
tttctcacaagcaatgccat

SEQ ID NO: 12 - RNA, 20 nt, synthetic construct
  source 1..20: mol_type = other RNA
aattataccttcgtgaagct

SEQ ID NO: 13 - RNA, 20 nt, synthetic construct
  source 1..20: mol_type = other RNA
gattaaaccaaaaattgccc

SEQ ID NO: 14 - RNA, 20 nt, synthetic construct
  source 1..20: mol_type = other RNA
tgtgattgctttatgagcca

SEQ ID NO: 15 - RNA, 20 nt, synthetic construct
  source 1..20: mol_type = other RNA
ttgaattttgagagtaagat

SEQ ID NO: 16 - RNA, 20 nt, synthetic construct
  source 1..20: mol_type = other RNA
aatttacttagtgtttaaag

SEQ ID NO: 17 - RNA, 20 nt, synthetic construct
  source 1..20: mol_type = other RNA
tatatttaaaaggtgaggat

SEQ ID NO: 18 - RNA, 20 nt, synthetic construct
  source 1..20: mol_type = other RNA
aaaatagaggagcatacaaa

SEQ ID NO: 19 - RNA, 20 nt, synthetic construct
  source 1..20: mol_type = other RNA
tcatgtacttatcatgtttt

SEQ ID NO: 20 - RNA, 20 nt, synthetic construct
  source 1..20: mol_type = other RNA
ctctaaagatgtttaataaa

SEQ ID NO: 21 - RNA, 20 nt, synthetic construct
  source 1..20: mol_type = other RNA
atatatttaaaaggtgagga

SEQ ID NO: 22 - RNA, 20 nt, synthetic construct
  source 1..20: mol_type = other RNA
atataaataaaacttatcca

SEQ ID NO: 23 - RNA, 20 nt, synthetic construct
  source 1..20: mol_type = other RNA
tttatattacttctatttaa

SEQ ID NO: 24 - RNA, 20 nt, synthetic construct
  source 1..20: mol_type = other RNA
atattaattacttaaatgtg

SEQ ID NO: 25 - RNA, 20 nt, synthetic construct
  source 1..20: mol_type = other RNA
atgtacttatcatgtttttg

SEQ ID NO: 26 - RNA, 20 nt, synthetic construct
  source 1..20: mol_type = other RNA
taaaatatatttaaaaggtg

SEQ ID NO: 27 - RNA, 20 nt, synthetic construct
  source 1..20: mol_type = other RNA
aattgaaaatgataaaatag

SEQ ID NO: 28 - RNA, 20 nt, synthetic construct
  source 1..20: mol_type = other RNA
aaaaacatgataagtacatg

SEQ ID NO: 29 - RNA, 20 nt, synthetic construct
  source 1..20: mol_type = other RNA
tgatggatacattaattagc

SEQ ID NO: 30 - RNA, 20 nt, synthetic construct
  source 1..20: mol_type = other RNA
aatataaataaaacttatcc

SEQ ID NO: 31 - RNA, 20 nt, synthetic construct
  source 1..20: mol_type = other RNA
catgtacttatcatgttttt

SEQ ID NO: 32 - RNA, 20 nt, synthetic construct
  source 1..20: mol_type = other RNA
tggagctctattgtacagca

SEQ ID NO: 33 - RNA, 20 nt, synthetic construct
  source 1..20: mol_type = other RNA
atgataagtacatgaggtga

SEQ ID NO: 34 - RNA, 20 nt, synthetic construct
  source 1..20: mol_type = other RNA
tagacagaatgaataagttc

SEQ ID NO: 35 - RNA, 20 nt, synthetic construct
  source 1..20: mol_type = other RNA
ataaaaattgtatatattta

SEQ ID NO: 36 - RNA, 20 nt, synthetic construct
  source 1..20: mol_type = other RNA
aaagataaaatatatttaaa

SEQ ID NO: 37 - RNA, 20 nt, synthetic construct
  source 1..20: mol_type = other RNA
tttaaatatattttatcttt

SEQ ID NO: 38 - RNA, 20 nt, synthetic construct
  source 1..20: mol_type = other RNA
ttaaatatattttatcttta

SEQ ID NO: 39 - RNA, 21 nt, synthetic construct
  source 1..21: mol_type = other RNA
atagggggccaatcttactct

SEQ ID NO: 40 - RNA, 21 nt, synthetic construct
  source 1..21: mol_type = other RNA
attcaagatagacgagacaca

SEQ ID NO: 41 - RNA, 21 nt, synthetic construct
  source 1..21: mol_type = other RNA
taaaacttatccagggcaatt

SEQ ID NO: 42 - RNA, 21 nt, synthetic construct
  source 1..21: mol_type = other RNA
aaatttatgaagttcatcgca

SEQ ID NO: 43 - RNA, 21 nt, synthetic construct
  source 1..21: mol_type = other RNA
tttttcccagcttcacgaagg

SEQ ID NO: 44 - RNA, 21 nt, synthetic construct
  source 1..21: mol_type = other RNA
cccagcttcacgaaggtataa

SEQ ID NO: 45 - RNA, 21 nt, synthetic construct
  source 1..21: mol_type = other RNA
tcacaagcaatgccatagggg

SEQ ID NO: 46 - RNA, 21 nt, synthetic construct
  source 1..21: mol_type = other RNA
ctactgcagatgatacgaaca

SEQ ID NO: 47 - RNA, 21 nt, synthetic construct
  source 1..21: mol_type = other RNA
cgagacacaaacaatgctact

SEQ ID NO: 48 - RNA, 21 nt, synthetic construct
  source 1..21: mol_type = other RNA
cttatccagggcaatttttgg

SEQ ID NO: 49 - RNA, 21 nt, synthetic construct
  source 1..21: mol_type = other RNA
atattttgtgttcgtatcatc

SEQ ID NO: 50 - RNA, 21 nt, synthetic construct
  source 1..21: mol_type = other RNA
attgtttgtgtctcgtctatc

SEQ ID NO: 51 - RNA, 21 nt, synthetic construct
  source 1..21: mol_type = other RNA
agcatacaaaaggattaaacc

SEQ ID NO: 52 - RNA, 21 nt, synthetic construct
  source 1..21: mol_type = other RNA
ttgtgtctcgtctatcttgaa

SEQ ID NO: 53 - RNA, 21 nt, synthetic construct
  source 1..21: mol_type = other RNA
gggccaatcttactctcaaaa

SEQ ID NO: 54 - RNA, 21 nt, synthetic construct
  source 1..21: mol_type = other RNA
gacacaaacaatgctactgca

SEQ ID NO: 55 - RNA, 21 nt, synthetic construct
  source 1..21: mol_type = other RNA
tctgagtcacacaagatgaca

SEQ ID NO: 56 - RNA, 21 nt, synthetic construct
  source 1..21: mol_type = other RNA
ctgaatccacacatttaagta

SEQ ID NO: 57 - RNA, 21 nt, synthetic construct
  source 1..21: mol_type = other RNA
tgctttatgagccaaggagag

SEQ ID NO: 58 - RNA, 21 nt, synthetic construct
  source 1..21: mol_type = other RNA
gtcacacaagatgacaagcaa

SEQ ID NO: 59 - RNA, 21 nt, synthetic construct
  source 1..21: mol_type = other RNA
acatacctctttaaacactaa

SEQ ID NO: 60 - RNA, 21 nt, synthetic construct
  source 1..21: mol_type = other RNA
ttaaaccaaaaattgccctgg

SEQ ID NO: 61 - RNA, 21 nt, synthetic construct
  source 1..21: mol_type = other RNA
attacttaaatgtgtggattc

SEQ ID NO: 62 - RNA, 21 nt, synthetic construct
  source 1..21: mol_type = other RNA
ttgcgatgaacttcataaatt

SEQ ID NO: 63 - RNA, 21 nt, synthetic construct
  source 1..21: mol_type = other RNA
catgctctccttggctcataa

SEQ ID NO: 64 - RNA, 21 nt, synthetic construct
  source 1..21: mol_type = other RNA
cttatttctgaatccacacat

SEQ ID NO: 65 - RNA, 21 nt, synthetic construct
  source 1..21: mol_type = other RNA
ggcattgcttgtgagaaaaca

SEQ ID NO: 66 - RNA, 21 nt, synthetic construct
  source 1..21: mol_type = other RNA
cagaacatacctctttaaaca

SEQ ID NO: 67 - RNA, 21 nt, synthetic construct
  source 1..21: mol_type = other RNA
tcattttcccatcctcacctt

SEQ ID NO: 68 - RNA, 21 nt, synthetic construct
  source 1..21: mol_type = other RNA
agaggtatgttctgagtcaca

SEQ ID NO: 69 - RNA, 21 nt, synthetic construct
  source 1..21: mol_type = other RNA
aggattaaaccaaaaattgcc

SEQ ID NO: 70 - RNA, 21 nt, synthetic construct
  source 1..21: mol_type = other RNA
aatgacaatatttaatttagc

SEQ ID NO: 71 - RNA, 21 nt, synthetic construct
  source 1..21: mol_type = other RNA
aaaatgtatatgtgtactcct

SEQ ID NO: 72 - RNA, 21 nt, synthetic construct
  source 1..21: mol_type = other RNA
aataaaaggttaagctgagta

SEQ ID NO: 73 - RNA, 21 nt, synthetic construct
  source 1..21: mol_type = other RNA
gcaaacagttgtatattaaag

SEQ ID NO: 74 - RNA, 21 nt, synthetic construct
  source 1..21: mol_type = other RNA
tagtgtttaaagaggtatgtt

SEQ ID NO: 75 - RNA, 21 nt, synthetic construct
  source 1..21: mol_type = other RNA
cttaaatgtgtggattcagaa

SEQ ID NO: 76 - RNA, 21 nt, synthetic construct
  source 1..21: mol_type = other RNA
ttcacgaaggtataattaaat

SEQ ID NO: 77 - RNA, 21 nt, synthetic construct
  source 1..21: mol_type = other RNA
aatattgagtgttttctcaca

SEQ ID NO: 78 - RNA, 21 nt, synthetic construct
  source 1..21: mol_type = other RNA
atgtgtactcctttaaataga

SEQ ID NO: 79 - RNA, 21 nt, synthetic construct
  source 1..21: mol_type = other RNA
aagtgtatatgctgttttcac

SEQ ID NO: 80 - RNA, 21 nt, synthetic construct
  source 1..21: mol_type = other RNA
attttaacaaatgtgctcatt

SEQ ID NO: 81 - RNA, 21 nt, synthetic construct
  source 1..21: mol_type = other RNA
tagctttaatatacaactgtt

SEQ ID NO: 82 - RNA, 21 nt, synthetic construct
  source 1..21: mol_type = other RNA
tctttgcattaagtaataatt

SEQ ID NO: 83 - RNA, 21 nt, synthetic construct
  source 1..21: mol_type = other RNA
tatatgtgtactcctttaaat

SEQ ID NO: 84 - RNA, 21 nt, synthetic construct
  source 1..21: mol_type = other RNA
atataaataaaacttatccag

SEQ ID NO: 85 - RNA, 21 nt, synthetic construct
  source 1..21: mol_type = other RNA
aaacagcatatacacttattt

SEQ ID NO: 86 - RNA, 21 nt, synthetic construct
  source 1..21: mol_type = other RNA
gataagaaatctctaaagatg

SEQ ID NO: 87 - RNA, 21 nt, synthetic construct
  source 1..21: mol_type = other RNA
ttctaaagataagaaatctct

SEQ ID NO: 88 - RNA, 21 nt, synthetic construct
  source 1..21: mol_type = other RNA
cagttgtatattaaagctaaa

SEQ ID NO: 89 - RNA, 21 nt, synthetic construct
  source 1..21: mol_type = other RNA
agatgatacgaacacaaaata

SEQ ID NO: 90 - RNA, 21 nt, synthetic construct
  source 1..21: mol_type = other RNA
ggatgggaaaatgatttcatt

SEQ ID NO: 91 - RNA, 21 nt, synthetic construct
  source 1..21: mol_type = other RNA
atttctgaatccacacattta

SEQ ID NO: 92 - RNA, 21 nt, synthetic construct
  source 1..21: mol_type = other RNA
gatgtttaataaaaggttaag

SEQ ID NO: 93 - RNA, 21 nt, synthetic construct
  source 1..21: mol_type = other RNA
atcttactctcaaaattcaat

SEQ ID NO: 94 - RNA, 21 nt, synthetic construct
  source 1..21: mol_type = other RNA
tttaaaaggtgaggatgggaa

SEQ ID NO: 95 - RNA, 21 nt, synthetic construct
  source 1..21: mol_type = other RNA
cagaatttacttagtgtttaa

SEQ ID NO: 96 - RNA, 21 nt, synthetic construct
  source 1..21: mol_type = other RNA
atgctcctctattttatcatt

SEQ ID NO: 97 - RNA, 21 nt, synthetic construct
  source 1..21: mol_type = other RNA
cgtgaagctgggaaaaaagaa

SEQ ID NO: 98 - RNA, 21 nt, synthetic construct
  source 1..21: mol_type = other RNA
aatctctaaagatgtttaata

SEQ ID NO: 99 - RNA, 21 nt, synthetic construct
  source 1..21: mol_type = other RNA
tagtagaattacatataacaa

SEQ ID NO: 100 - RNA, 21 nt, synthetic construct
  source 1..21: mol_type = other RNA
atgcaaagaaaaatgcttaat

SEQ ID NO: 101 - RNA, 21 nt, synthetic construct
  source 1..21: mol_type = other RNA
agagcatgatttatattaatt

SEQ ID NO: 102 - RNA, 21 nt, synthetic construct
  source 1..21: mol_type = other RNA
atttgttatatgtaattctac

SEQ ID NO: 103 - RNA, 21 nt, synthetic construct
  source 1..21: mol_type = other RNA
ctggagctctttttctcttta

SEQ ID NO: 104 - RNA, 21 nt, synthetic construct
  source 1..21: mol_type = other RNA
gcatttttctttgcattaagt

SEQ ID NO: 105 - RNA, 21 nt, synthetic construct
  source 1..21: mol_type = other RNA
tctcaaaattcaatgacaata

SEQ ID NO: 106 - RNA, 21 nt, synthetic construct
  source 1..21: mol_type = other RNA
atatttaaaaggtgaggatgg

SEQ ID NO: 107 - RNA, 21 nt, synthetic construct
  source 1..21: mol_type = other RNA
tgtatatgctgttttcacaaa

SEQ ID NO: 108 - RNA, 21 nt, synthetic construct
  source 1..21: mol_type = other RNA
cccaaaaacatgataagtaca

SEQ ID NO: 109 - RNA, 21 nt, synthetic construct
  source 1..21: mol_type = other RNA
tgtgctcatttaaaattatag

SEQ ID NO: 110 - RNA, 21 nt, synthetic construct
  source 1..21: mol_type = other RNA
taattattacttaatgcaaag

SEQ ID NO: 111 - RNA, 21 nt, synthetic construct
  source 1..21: mol_type = other RNA
gcatgatttatattaattgaa

SEQ ID NO: 112 - RNA, 21 nt, synthetic construct
  source 1..21: mol_type = other RNA
tttcttttttcccagcttcac

SEQ ID NO: 113 - RNA, 21 nt, synthetic construct
  source 1..21: mol_type = other RNA
cattaagcatttttctttgca

SEQ ID NO: 114 - RNA, 21 nt, synthetic construct
  source 1..21: mol_type = other RNA
caactgtttgcgatgaacttc

SEQ ID NO: 115 - RNA, 21 nt, synthetic construct
  source 1..21: mol_type = other RNA
attataaaatgattaattcca

SEQ ID NO: 116 - RNA, 21 nt, synthetic construct
  source 1..21: mol_type = other RNA
aaaaacaactaatttgttata

SEQ ID NO: 117 - RNA, 21 nt, synthetic construct
  source 1..21: mol_type = other RNA
attttaaatgagcacatttgt

SEQ ID NO: 118 - RNA, 21 nt, synthetic construct
  source 1..21: mol_type = other RNA
ttaaatgagcacatttgttaa

SEQ ID NO: 119 - RNA, 21 nt, synthetic construct
  source 1..21: mol_type = other RNA
aagctaaattaaatattgtca

SEQ ID NO: 120 - RNA, 21 nt, synthetic construct
  source 1..21: mol_type = other RNA
tcctctattttatcattttca

SEQ ID NO: 121 - RNA, 21 nt, synthetic construct
  source 1..21: mol_type = other RNA
atatgtaattctactataatt

SEQ ID NO: 122 - RNA, 21 nt, synthetic construct
  source 1..21: mol_type = other RNA
attgtcattgaattttgagag

SEQ ID NO: 123 - RNA, 21 nt, synthetic construct
  source 1..21: mol_type = other RNA
ccacacatttaagtaattaat

SEQ ID NO: 124 - RNA, 21 nt, synthetic construct
  source 1..21: mol_type = other RNA
ttggggtgagaacatttaaga

SEQ ID NO: 125 - RNA, 21 nt, synthetic construct
  source 1..21: mol_type = other RNA
aaccttttattaaacatcttt

SEQ ID NO: 126 - RNA, 21 nt, synthetic construct
  source 1..21: mol_type = other RNA
attatagtagaattacatata

SEQ ID NO: 127 - RNA, 21 nt, synthetic construct
  source 1..21: mol_type = other RNA
taagcatttttctttgcatta

SEQ ID NO: 128 - RNA, 21 nt, synthetic construct
  source 1..21: mol_type = other RNA
ttagttgtttttctaaagata

SEQ ID NO: 129 - RNA, 21 nt, synthetic construct
  source 1..21: mol_type = other RNA
ttatattaattacttaaatgt

SEQ ID NO: 130 - RNA, 21 nt, synthetic construct
  source 1..21: mol_type = other RNA
gtatatatttatggcagacaa

SEQ ID NO: 131 - RNA, 21 nt, synthetic construct
  source 1..21: mol_type = other RNA
aaaaacatgataagtacatga

SEQ ID NO: 132 - RNA, 21 nt, synthetic construct
  source 1..21: mol_type = other RNA
tgttctcaccccaaaaacatg

SEQ ID NO: 133 - RNA, 21 nt, synthetic construct
  source 1..21: mol_type = other RNA
gagtacaaagtttcagctaga

SEQ ID NO: 134 - RNA, 21 nt, synthetic construct
  source 1..21: mol_type = other RNA
taacaaattagttgtttttct

SEQ ID NO: 135 - RNA, 21 nt, synthetic construct
  source 1..21: mol_type = other RNA
acaaatgtgctcatttaaaat

SEQ ID NO: 136 - RNA, 21 nt, synthetic construct
  source 1..21: mol_type = other RNA
tacttaatgcaaagaaaaatg

SEQ ID NO: 137 - RNA, 21 nt, synthetic construct
  source 1..21: mol_type = other RNA
attttatcattttcaattaat

SEQ ID NO: 138 - RNA, 21 nt, synthetic construct
  source 1..21: mol_type = other RNA
gtgatggatacattaattagc

SEQ ID NO: 139 - RNA, 21 nt, synthetic construct
  source 1..21: mol_type = other RNA
ctcatgtacttatcatgtttt

SEQ ID NO: 140 - RNA, 21 nt, synthetic construct
  source 1..21: mol_type = other RNA
taatataaaaaacagaattta

SEQ ID NO: 141 - RNA, 21 nt, synthetic construct
  source 1..21: mol_type = other RNA
agttttatttatattaattac

SEQ ID NO: 142 - RNA, 21 nt, synthetic construct
  source 1..21: mol_type = other RNA
acatgataagtacatgaggtg

SEQ ID NO: 143 - RNA, 21 nt, synthetic construct
  source 1..21: mol_type = other RNA
caaatcttaaaaactatttta

SEQ ID NO: 144 - RNA, 21 nt, synthetic construct
  source 1..21: mol_type = other RNA
cacatttgttaaaatagtttt

SEQ ID NO: 145 - RNA, 21 nt, synthetic construct
  source 1..21: mol_type = other RNA
taaatattgtcattgaatttt

SEQ ID NO: 146 - RNA, 21 nt, synthetic construct
  source 1..21: mol_type = other RNA
atttatattaattgaaaatga

SEQ ID NO: 147 - RNA, 21 nt, synthetic construct
  source 1..21: mol_type = other RNA
ataaaatagaggagcatacaa

SEQ ID NO: 148 - RNA, 21 nt, synthetic construct
  source 1..21: mol_type = other RNA
caaaacatcatgttgtctgcc

SEQ ID NO: 149 - RNA, 21 nt, synthetic construct
  source 1..21: mol_type = other RNA
tgatatatgtacacattataa

SEQ ID NO: 150 - RNA, 21 nt, synthetic construct
  source 1..21: mol_type = other RNA
acatttaagatctaatctctt

SEQ ID NO: 151 - RNA, 21 nt, synthetic construct
  source 1..21: mol_type = other RNA
agtttcagctagacagaatga

SEQ ID NO: 152 - RNA, 21 nt, synthetic construct
  source 1..21: mol_type = other RNA
gataaaatatatttaaaaggt

SEQ ID NO: 153 - RNA, 21 nt, synthetic construct
  source 1..21: mol_type = other RNA
cctaaagataaaatatattta

SEQ ID NO: 154 - RNA, 21 nt, synthetic construct
  source 1..21: mol_type = other RNA
ttttatattacttctatttaa

SEQ ID NO: 155 - RNA, 21 nt, synthetic construct
  source 1..21: mol_type = other RNA
cataaatatatacaattttta

SEQ ID NO: 156 - RNA, 21 nt, synthetic construct
  source 1..21: mol_type = other RNA
atgttgtctgccataaatata

SEQ ID NO: 157 - RNA, 21 nt, synthetic construct
  source 1..21: mol_type = other RNA
taaatgttctcaccccaaaaa

SEQ ID NO: 158 - RNA, 21 nt, synthetic construct
  source 1..21: mol_type = other RNA
aaattgctaagagattagatc

SEQ ID NO: 159 - RNA, 21 nt, synthetic construct
  source 1..21: mol_type = other RNA
caagtatacaatacattatta

SEQ ID NO: 160 - RNA, 21 nt, synthetic construct
  source 1..21: mol_type = other RNA
acaaagtttcagctagacaga

SEQ ID NO: 161 - RNA, 21 nt, synthetic construct
  source 1..21: mol_type = other RNA
ttcataaatttttaattatta

SEQ ID NO: 162 - RNA, 21 nt, synthetic construct
  source 1..21: mol_type = other RNA
attagctggaattaatcattt

SEQ ID NO: 163 - RNA, 21 nt, synthetic construct
  source 1..21: mol_type = other RNA
agtacatgaggtgatggatac

SEQ ID NO: 164 - RNA, 21 nt, synthetic construct
  source 1..21: mol_type = other RNA
ttgtatacttgaaaattgcta

SEQ ID NO: 165 - RNA, 21 nt, synthetic construct
  source 1..21: mol_type = other RNA
agcatggtgactatacttaat

SEQ ID NO: 166 - RNA, 21 nt, synthetic construct
  source 1..21: mol_type = other RNA
tacagcatggtgactatactt

SEQ ID NO: 167 - RNA, 21 nt, synthetic construct
  source 1..21: mol_type = other RNA
aaatagaagtaatataaaaaa

SEQ ID NO: 168 - RNA, 21 nt, synthetic construct
  source 1..21: mol_type = other RNA
ggaaaaaagaaaaaaatgtca

SEQ ID NO: 169 - RNA, 21 nt, synthetic construct
  source 1..21: mol_type = other RNA
ttatggcagacaacatgatgt

SEQ ID NO: 170 - RNA, 21 nt, synthetic construct
  source 1..21: mol_type = other RNA
ttttgatatatgtacacatta

SEQ ID NO: 171 - RNA, 21 nt, synthetic construct
  source 1..21: mol_type = other RNA
tggatacattaattagctgga

SEQ ID NO: 172 - RNA, 21 nt, synthetic construct
  source 1..21: mol_type = other RNA
atacaatacattattattaag

SEQ ID NO: 173 - RNA, 21 nt, synthetic construct
  source 1..21: mol_type = other RNA
ttctggagctctattgtacag

SEQ ID NO: 174 - RNA, 21 nt, synthetic construct
  source 1..21: mol_type = other RNA
taagtaataattaaaaattta

SEQ ID NO: 175 - RNA, 21 nt, synthetic construct
  source 1..21: mol_type = other RNA
tgtttttggggtgagaacatt

SEQ ID NO: 176 - RNA, 21 nt, synthetic construct
  source 1..21: mol_type = other RNA
tacttgaaaattgctaagaga

SEQ ID NO: 177 - RNA, 21 nt, synthetic construct
  source 1..21: mol_type = other RNA
ataataatgtattgtatactt

SEQ ID NO: 178 - RNA, 21 nt, synthetic construct
  source 1..21: mol_type = other RNA
gatctaatctcttagcaattt

SEQ ID NO: 179 - RNA, 21 nt, synthetic construct
  source 1..21: mol_type = other RNA
tctcttagcaattttcaagta

SEQ ID NO: 180 - RNA, 21 nt, synthetic construct
  source 1..21: mol_type = other RNA
ttgtacagcatggtgactata

SEQ ID NO: 181 - RNA, 21 nt, synthetic construct
  source 1..21: mol_type = other RNA
ttaagtatagtcaccatgctg

SEQ ID NO: 182 - RNA, 23 nt, synthetic construct
  source 1..23: mol_type = other RNA
aatagaagtaatataaaaaacag

SEQ ID NO: 183 - RNA, 23 nt, synthetic construct
  source 1..23: mol_type = other RNA
aaggagtacacatatacatttta

SEQ ID NO: 184 - RNA, 23 nt, synthetic construct
  source 1..23: mol_type = other RNA
tattacttctatttaaaggagta

SEQ ID NO: 185 - RNA, 23 nt, synthetic construct
  source 1..23: mol_type = other RNA
cttagtgtttaaagaggtatgtt

SEQ ID NO: 186 - RNA, 23 nt, synthetic construct
  source 1..23: mol_type = other RNA
aagaggtatgttctgagtcacac

SEQ ID NO: 187 - RNA, 23 nt, synthetic construct
  source 1..23: mol_type = other RNA
aacactaagtaaattctgttttt

SEQ ID NO: 188 - RNA, 23 nt, synthetic construct
  source 1..23: mol_type = other RNA
tgagccaaggagagcatgattta

SEQ ID NO: 189 - RNA, 23 nt, synthetic construct
  source 1..23: mol_type = other RNA
tattaattgaaaatgataaaata

SEQ ID NO: 190 - RNA, 23 nt, synthetic construct
  source 1..23: mol_type = other RNA
aattaatataaatcatgctctcc

SEQ ID NO: 191 - RNA, 23 nt, synthetic construct
  source 1..23: mol_type = other RNA
tcattttcaattaatataaatca

SEQ ID NO: 192 - RNA, 23 nt, synthetic construct
  source 1..23: mol_type = other RNA
tatgctcctctattttatcattt

SEQ ID NO: 193 - RNA, 23 nt, synthetic construct
  source 1..23: mol_type = other RNA
atccttttgtatgctcctctatt

SEQ ID NO: 194 - RNA, 23 nt, synthetic construct
  source 1..23: mol_type = other RNA
gtttaatccttttgtatgctcct

SEQ ID NO: 195 - RNA, 23 nt, synthetic construct
  source 1..23: mol_type = other RNA
tttatattaattacttaaatgtg

SEQ ID NO: 196 - RNA, 23 nt, synthetic construct
  source 1..23: mol_type = other RNA
tattaattacttaaatgtgtgga

SEQ ID NO: 197 - RNA, 23 nt, synthetic construct
  source 1..23: mol_type = other RNA
agtaattaatataaataaaactt

SEQ ID NO: 198 - RNA, 23 nt, synthetic construct
  source 1..23: mol_type = other RNA
tgaatccacacatttaagtaatt

SEQ ID NO: 199 - RNA, 23 nt, synthetic construct
  source 1..23: mol_type = other RNA
acaaaaatagttatcagctgaca

SEQ ID NO: 200 - RNA, 23 nt, synthetic construct
  source 1..23: mol_type = other RNA
tgaaaacagcatatacacttatt

SEQ ID NO: 201 - RNA, 23 nt, synthetic construct
  source 1..23: mol_type = other RNA
ttttttcccagcttcacgaaggt

SEQ ID NO: 202 - RNA, 23 nt, synthetic construct
  source 1..23: mol_type = other RNA
ccagcttcacgaaggtataatta

SEQ ID NO: 203 - RNA, 23 nt, synthetic construct
  source 1..23: mol_type = other RNA
attataccttcgtgaagctggga

SEQ ID NO: 204 - RNA, 23 nt, synthetic construct
  source 1..23: mol_type = other RNA
tttaattataccttcgtgaagct

SEQ ID NO: 205 - RNA, 23 nt, synthetic construct
  source 1..23: mol_type = other RNA
tggcagacaacatgatgttttgt

SEQ ID NO: 206 - RNA, 23 nt, synthetic construct
  source 1..23: mol_type = other RNA
atatatgtacacattataaaatg

SEQ ID NO: 207 - RNA, 23 nt, synthetic construct
  source 1..23: mol_type = other RNA
taatgtgtacatatatcaaaaca

SEQ ID NO: 208 - RNA, 23 nt, synthetic construct
  source 1..23: mol_type = other RNA
gggtgagaacatttaagatctaa

SEQ ID NO: 209 - RNA, 23 nt, synthetic construct
  source 1..23: mol_type = other RNA
agatctaatctcttagcaatttt

SEQ ID NO: 210 - RNA, 23 nt, synthetic construct
  source 1..23: mol_type = other RNA
aagtatacaatacattattatta

SEQ ID NO: 211 - RNA, 23 nt, synthetic construct
  source 1..23: mol_type = other RNA
agctagacagaatgaataagttc

SEQ ID NO: 212 - RNA, 23 nt, synthetic construct
  source 1..23: mol_type = other RNA
tactcagcttaaccttttattaa

SEQ ID NO: 213 - RNA, 23 nt, synthetic construct
  source 1..23: mol_type = other RNA
ttaaacatctttagagatttctt

SEQ ID NO: 214 - RNA, 23 nt, synthetic construct
  source 1..23: mol_type = other RNA
ataaaaggttaagctgagtacaa

SEQ ID NO: 215 - RNA, 23 nt, synthetic construct
  source 1..23: mol_type = other RNA
gagatttcttatctttagaaaaa

SEQ ID NO: 216 - RNA, 23 nt, synthetic construct
  source 1..23: mol_type = other RNA
ttatctttagaaaaacaactaat

SEQ ID NO: 217 - RNA, 23 nt, synthetic construct
  source 1..23: mol_type = other RNA
gaaaaacaactaatttgttatat

SEQ ID NO: 218 - RNA, 23 nt, synthetic construct
  source 1..23: mol_type = other RNA
taaagataagaaatctctaaaga

SEQ ID NO: 219 - RNA, 23 nt, synthetic construct
  source 1..23: mol_type = other RNA
ttatatgtaattctactataatt

SEQ ID NO: 220 - RNA, 23 nt, synthetic construct
  source 1..23: mol_type = other RNA
aatgagcacatttgttaaaatag

SEQ ID NO: 221 - RNA, 23 nt, synthetic construct
  source 1..23: mol_type = other RNA
aaattatagtagaattacatata

SEQ ID NO: 222 - RNA, 23 nt, synthetic construct
  source 1..23: mol_type = other RNA
ttaaaatagtttttaagatttgt

SEQ ID NO: 223 - RNA, 23 nt, synthetic construct
  source 1..23: mol_type = other RNA
acaaatgtgctcatttaaaatta

SEQ ID NO: 224 - RNA, 23 nt, synthetic construct
  source 1..23: mol_type = other RNA
agatttgttaaagagaaaaagag

SEQ ID NO: 225 - RNA, 23 nt, synthetic construct
  source 1..23: mol_type = other RNA
ttaaagagaaaaagagctccagc

SEQ ID NO: 226 - RNA, 23 nt, synthetic construct
  source 1..23: mol_type = other RNA
acaaatcttaaaaactattttaa

SEQ ID NO: 227 - RNA, 23 nt, synthetic construct
  source 1..23: mol_type = other RNA
tctttaacaaatcttaaaaacta

SEQ ID NO: 228 - RNA, 23 nt, synthetic construct
  source 1..23: mol_type = other RNA
tgttacatatgctggagctcttt

SEQ ID NO: 229 - RNA, 23 nt, synthetic construct
  source 1..23: mol_type = other RNA
cattaagcatttttctttgcatt

SEQ ID NO: 230 - RNA, 23 nt, synthetic construct
  source 1..23: mol_type = other RNA
tttgcattaagtaataattaaaa

SEQ ID NO: 231 - RNA, 23 nt, synthetic construct
  source 1..23: mol_type = other RNA
cattaagtaataattaaaaattt

SEQ ID NO: 232 - RNA, 23 nt, synthetic construct
  source 1..23: mol_type = other RNA
attattacttaatgcaaagaaaa

SEQ ID NO: 233 - RNA, 23 nt, synthetic construct
  source 1..23: mol_type = other RNA
tgaagttcatcgcaaacagttgt

SEQ ID NO: 234 - RNA, 23 nt, synthetic construct
  source 1..23: mol_type = other RNA
cgatgaacttcataaatttttaa

SEQ ID NO: 235 - RNA, 23 nt, synthetic construct
  source 1..23: mol_type = other RNA
atatacaactgtttgcgatgaac

SEQ ID NO: 236 - RNA, 23 nt, synthetic construct
  source 1..23: mol_type = other RNA
gctttaatatacaactgtttgcg

SEQ ID NO: 237 - RNA, 23 nt, synthetic construct
  source 1..23: mol_type = other RNA
atttagctttaatatacaactgt

SEQ ID NO: 238 - RNA, 23 nt, synthetic construct
  source 1..23: mol_type = other RNA
agagtaagattggccccctatgg

SEQ ID NO: 239 - RNA, 23 nt, synthetic construct
  source 1..23: mol_type = other RNA
tcacaagcaatgccatagggggc

SEQ ID NO: 240 - RNA, 23 nt, synthetic construct
  source 1..23: mol_type = other RNA
tgttcgtatcatctgcagtagca

SEQ ID NO: 241 - RNA, 23 nt, synthetic construct
  source 1..23: mol_type = other RNA
tgtctcgtctatcttgaatgaaa

SEQ ID NO: 242 - RNA, 23 nt, synthetic construct
  source 1..23: mol_type = other RNA
attcaagatagacgagacacaaa

SEQ ID NO: 243 - RNA, 23 nt, synthetic construct
  source 1..23: mol_type = other RNA
ccatcctcaccttttaaatatat

SEQ ID NO: 244 - RNA, 23 nt, synthetic construct
  source 1..23: mol_type = other RNA
aaaggtgaggatgggaaaatgat

SEQ ID NO: 245 - RNA, 20 nt, synthetic construct
  source 1..20: mol_type = other RNA
ctgtgtgtgcctaatcgtca

SEQ ID NO: 246 - RNA, 20 nt, synthetic construct
  source 1..20: mol_type = other RNA
ccttgcaaattaggggtaac

SEQ ID NO: 247 - RNA, 20 nt, synthetic construct
  source 1..20: mol_type = other RNA
cttgacgattaggcacacac

SEQ ID NO: 248 - RNA, 20 nt, synthetic construct
  source 1..20: mol_type = other RNA
ctccgaagctttaatgatgt

SEQ ID NO: 249 - RNA, 20 nt, synthetic construct
  source 1..20: mol_type = other RNA
cctgttacccctaatttgca

SEQ ID NO: 250 - RNA, 20 nt, synthetic construct
  source 1..20: mol_type = other RNA
caccttcttccttgacgatt

SEQ ID NO: 251 - RNA, 20 nt, synthetic construct
  source 1..20: mol_type = other RNA
gattccttggggacattacc

SEQ ID NO: 252 - RNA, 20 nt, synthetic construct
  source 1..20: mol_type = other RNA
aggtgtaatcagtgtcaacc

SEQ ID NO: 253 - RNA, 20 nt, synthetic construct
  source 1..20: mol_type = other RNA
actgtctgtaatgctaagac

SEQ ID NO: 254 - RNA, 20 nt, synthetic construct
  source 1..20: mol_type = other RNA
ccagtcttatcacagttgca

SEQ ID NO: 255 - RNA, 20 nt, synthetic construct
  source 1..20: mol_type = other RNA
acagtcacaggccttacaat

SEQ ID NO: 256 - RNA, 20 nt, synthetic construct
  source 1..20: mol_type = other RNA
ggaaagaattattttgccgt

SEQ ID NO: 257 - RNA, 20 nt, synthetic construct
  source 1..20: mol_type = other RNA
ccttgcaactgtgataagac

SEQ ID NO: 258 - RNA, 20 nt, synthetic construct
  source 1..20: mol_type = other RNA
gttagatgtcaccaattgta

SEQ ID NO: 259 - RNA, 20 nt, synthetic construct
  source 1..20: mol_type = other RNA
atggtcaaattgtacctgtg

SEQ ID NO: 260 - RNA, 20 nt, synthetic construct
  source 1..20: mol_type = other RNA
ccatggaggttacactggca

SEQ ID NO: 261 - RNA, 20 nt, synthetic construct
  source 1..20: mol_type = other RNA
gccatggaggttacactggc

SEQ ID NO: 262 - RNA, 20 nt, synthetic construct
  source 1..20: mol_type = other RNA
tagcattacagacagtccca

SEQ ID NO: 263 - RNA, 20 nt, synthetic construct
  source 1..20: mol_type = other RNA
attgggtcacaaatggtccc

SEQ ID NO: 264 - RNA, 20 nt, synthetic construct
  source 1..20: mol_type = other RNA
attccttggggacattacct

SEQ ID NO: 265 - RNA, 20 nt, synthetic construct
  source 1..20: mol_type = other RNA
ctgtctgtaatgctaagaca

SEQ ID NO: 266 - RNA, 20 nt, synthetic construct
  source 1..20: mol_type = other RNA
cttgcaactgtgataagact

SEQ ID NO: 267 - RNA, 20 nt, synthetic construct
  source 1..20: mol_type = other RNA
acaggcactggccactgatt

SEQ ID NO: 268 - RNA, 20 nt, synthetic construct
  source 1..20: mol_type = other RNA
accatttgtgacccaatcag

SEQ ID NO: 269 - RNA, 20 nt, synthetic construct
  source 1..20: mol_type = other RNA
tgcctaatcgtcaaggaaga

SEQ ID NO: 270 - RNA, 20 nt, synthetic construct
  source 1..20: mol_type = other RNA
ggtgtcacactgaagtcctt

SEQ ID NO: 271 - RNA, 20 nt, synthetic construct
  source 1..20: mol_type = other RNA
atctgcaagcccaatgttga

SEQ ID NO: 272 - RNA, 20 nt, synthetic construct
  source 1..20: mol_type = other RNA
gccactgattgggtcacaaa

SEQ ID NO: 273 - RNA, 20 nt, synthetic construct
  source 1..20: mol_type = other RNA
cactgtctcccttcaacatt

SEQ ID NO: 274 - RNA, 20 nt, synthetic construct
  source 1..20: mol_type = other RNA
tggagggaaacttctaccta

SEQ ID NO: 275 - RNA, 20 nt, synthetic construct
  source 1..20: mol_type = other RNA
ctgctgtgtaacaaatcaac

SEQ ID NO: 276 - RNA, 20 nt, synthetic construct
  source 1..20: mol_type = other RNA
acaatgtccttgcaaattag

SEQ ID NO: 277 - RNA, 20 nt, synthetic construct
  source 1..20: mol_type = other RNA
gtaatcagtgtgagcctcac

SEQ ID NO: 278 - RNA, 20 nt, synthetic construct
  source 1..20: mol_type = other RNA
ctgagccatggaggttacac

SEQ ID NO: 279 - RNA, 20 nt, synthetic construct
  source 1..20: mol_type = other RNA
gcactgtctcccttcaacat

SEQ ID NO: 280 - RNA, 20 nt, synthetic construct
  source 1..20: mol_type = other RNA
gacaatgtccttgcaaatta

SEQ ID NO: 281 - RNA, 20 nt, synthetic construct
  source 1..20: mol_type = other RNA
aaattctgcaatcctcactc

SEQ ID NO: 282 - RNA, 20 nt, synthetic construct
  source 1..20: mol_type = other RNA
ggacaatgtccttgcaaatt

SEQ ID NO: 283 - RNA, 20 nt, synthetic construct
  source 1..20: mol_type = other RNA
cacaggcactggccactgat

SEQ ID NO: 284 - RNA, 20 nt, synthetic construct
  source 1..20: mol_type = other RNA
aggaatcacactcacacatc

SEQ ID NO: 285 - RNA, 20 nt, synthetic construct
  source 1..20: mol_type = other RNA
ggtcccaggtaatgtcccca

SEQ ID NO: 286 - RNA, 20 nt, synthetic construct
  source 1..20: mol_type = other RNA
ccctgccagtgtaacctcca

SEQ ID NO: 287 - RNA, 20 nt, synthetic construct
  source 1..20: mol_type = other RNA
gataagactgggacaataaa

SEQ ID NO: 288 - RNA, 20 nt, synthetic construct
  source 1..20: mol_type = other RNA
aggtgtgatcattgcaattt

SEQ ID NO: 289 - RNA, 20 nt, synthetic construct
  source 1..20: mol_type = other RNA
gatgtgtgagtgtgattcct

SEQ ID NO: 290 - RNA, 20 nt, synthetic construct
  source 1..20: mol_type = other RNA
atttgttcactgagccatgg

SEQ ID NO: 291 - RNA, 20 nt, synthetic construct
  source 1..20: mol_type = other RNA
gacacagctggatccctccc

SEQ ID NO: 292 - RNA, 20 nt, synthetic construct
  source 1..20: mol_type = other RNA
cagtgcaataaatgtttgga

SEQ ID NO: 293 - RNA, 20 nt, synthetic construct
  source 1..20: mol_type = other RNA
atccaacatcattaaagctt

SEQ ID NO: 294 - RNA, 20 nt, synthetic construct
  source 1..20: mol_type = other RNA
agaatttgttcactgagcca

SEQ ID NO: 295 - RNA, 20 nt, synthetic construct
  source 1..20: mol_type = other RNA
cccataaaagttttctctgc

SEQ ID NO: 296 - RNA, 20 nt, synthetic construct
  source 1..20: mol_type = other RNA
aattctgcaatcctcactct

SEQ ID NO: 297 - RNA, 20 nt, synthetic construct
  source 1..20: mol_type = other RNA
cctgcagagaaaacttttat

SEQ ID NO: 298 - RNA, 20 nt, synthetic construct
  source 1..20: mol_type = other RNA
cattacagacagtcccaggg

SEQ ID NO: 299 - RNA, 20 nt, synthetic construct
  source 1..20: mol_type = other RNA
gagacagtgcaataaatgtt

SEQ ID NO: 300 - RNA, 20 nt, synthetic construct
  source 1..20: mol_type = other RNA
ttagcattacagacagtccc

SEQ ID NO: 301 - RNA, 20 nt, synthetic construct
  source 1..20: mol_type = other RNA
acagtgcaataaatgtttgg

SEQ ID NO: 302 - RNA, 20 nt, synthetic construct
  source 1..20: mol_type = other RNA
cactcacactgcccagagtg

SEQ ID NO: 303 - RNA, 20 nt, synthetic construct
  source 1..20: mol_type = other RNA
tctgcaagcccaatgttgaa

SEQ ID NO: 304 - RNA, 20 nt, synthetic construct
  source 1..20: mol_type = other RNA
taatacatttctttcttacc

SEQ ID NO: 305 - RNA, 20 nt, synthetic construct
  source 1..20: mol_type = other RNA
atgtgtgagtgtgattcctt

SEQ ID NO: 306 - RNA, 20 nt, synthetic construct
  source 1..20: mol_type = other RNA
tgtgtgagtgtgattccttg

SEQ ID NO: 307 - RNA, 20 nt, synthetic construct
  source 1..20: mol_type = other RNA
attacagacagtcccaggga

SEQ ID NO: 308 - RNA, 20 nt, synthetic construct
  source 1..20: mol_type = other RNA
tccagctgtgtcacagtcac

SEQ ID NO: 309 - RNA, 20 nt, synthetic construct
  source 1..20: mol_type = other RNA
acacagctggatccctccct

SEQ ID NO: 310 - RNA, 20 nt, synthetic construct
  source 1..20: mol_type = other RNA
acctgcagagaaaactttta

SEQ ID NO: 311 - RNA, 20 nt, synthetic construct
  source 1..20: mol_type = other RNA
gcctgtgactgtgacacagc

SEQ ID NO: 312 - RNA, 20 nt, synthetic construct
  source 1..20: mol_type = other RNA
gattaggcacacacaggcac

SEQ ID NO: 313 - RNA, 20 nt, synthetic construct
  source 1..20: mol_type = other RNA
atattttatctttagggctt

SEQ ID NO: 314 - RNA, 20 nt, synthetic construct
  source 1..20: mol_type = other RNA
cacagttgcaaggcagacag

SEQ ID NO: 315 - RNA, 20 nt, synthetic construct
  source 1..20: mol_type = other RNA
gagtgcaaaaaagaagccaa

SEQ ID NO: 316 - RNA, 20 nt, synthetic construct
  source 1..20: mol_type = other RNA
gcagtgttgaaaattgtcaa

SEQ ID NO: 317 - RNA, 21 nt, synthetic construct
  source 1..21: mol_type = other RNA
ttaggggtaacaggtcttcgc

SEQ ID NO: 318 - RNA, 21 nt, synthetic construct
  source 1..21: mol_type = other RNA
gcactggccactgattgggtc

SEQ ID NO: 319 - RNA, 21 nt, synthetic construct
  source 1..21: mol_type = other RNA
ccaacatcattaaagcttcgg

SEQ ID NO: 320 - RNA, 21 nt, synthetic construct
  source 1..21: mol_type = other RNA
gagggaaacttctacctacgg

SEQ ID NO: 321 - RNA, 21 nt, synthetic construct
  source 1..21: mol_type = other RNA
ttacagcgaagacctgttacc

SEQ ID NO: 322 - RNA, 21 nt, synthetic construct
  source 1..21: mol_type = other RNA
tggtcccaggtaatgtcccca

SEQ ID NO: 323 - RNA, 21 nt, synthetic construct
  source 1..21: mol_type = other RNA
ggaaacttctacctacggcaa

SEQ ID NO: 324 - RNA, 21 nt, synthetic construct
  source 1..21: mol_type = other RNA
acagggcagtgcatctgcaag

SEQ ID NO: 325 - RNA, 21 nt, synthetic construct
  source 1..21: mol_type = other RNA
gtaacctccatggctcagtga

SEQ ID NO: 326 - RNA, 21 nt, synthetic construct
  source 1..21: mol_type = other RNA
attacctgggaccatttgtga

SEQ ID NO: 327 - RNA, 21 nt, synthetic construct
  source 1..21: mol_type = other RNA
ctgccagtgtaacctccatgg

SEQ ID NO: 328 - RNA, 21 nt, synthetic construct
  source 1..21: mol_type = other RNA
aattggtgacatctaacccat

SEQ ID NO: 329 - RNA, 21 nt, synthetic construct
  source 1..21: mol_type = other RNA
gtcacagtcacaggccttaca

SEQ ID NO: 330 - RNA, 21 nt, synthetic construct
  source 1..21: mol_type = other RNA
ggatccctccctgggactgtc

SEQ ID NO: 331 - RNA, 21 nt, synthetic construct
  source 1..21: mol_type = other RNA
atgatgttggatgtgagccct

SEQ ID NO: 332 - RNA, 21 nt, synthetic construct
  source 1..21: mol_type = other RNA
cactgcccagagtgaggattg

SEQ ID NO: 333 - RNA, 21 nt, synthetic construct
  source 1..21: mol_type = other RNA
ctgccctgtcttagcattaca

SEQ ID NO: 334 - RNA, 21 nt, synthetic construct
  source 1..21: mol_type = other RNA
tgtccttgcaaattaggggta

SEQ ID NO: 335 - RNA, 21 nt, synthetic construct
  source 1..21: mol_type = other RNA
aattctgcaatcctcactctg

SEQ ID NO: 336 - RNA, 21 nt, synthetic construct
  source 1..21: mol_type = other RNA
atcacacctaagccctaaaga

SEQ ID NO: 337 - RNA, 21 nt, synthetic construct
  source 1..21: mol_type = other RNA
tgcactcacactgcccagagt

SEQ ID NO: 338 - RNA, 21 nt, synthetic construct
  source 1..21: mol_type = other RNA
ctgtctgtaatgctaagacag

SEQ ID NO: 339 - RNA, 21 nt, synthetic construct
  source 1..21: mol_type = other RNA
actcacacatctggcagtgtt

SEQ ID NO: 340 - RNA, 21 nt, synthetic construct
  source 1..21: mol_type = other RNA
gcaatcctcactctgggcagt

SEQ ID NO: 341 - RNA, 21 nt, synthetic construct
  source 1..21: mol_type = other RNA
ctgtgtcacagtcacaggcct

SEQ ID NO: 342 - RNA, 21 nt, synthetic construct
  source 1..21: mol_type = other RNA
ttctccgaagctttaatgatg

SEQ ID NO: 343 - RNA, 21 nt, synthetic construct
  source 1..21: mol_type = other RNA
aattgtacctgtgaggctcac

SEQ ID NO: 344 - RNA, 21 nt, synthetic construct
  source 1..21: mol_type = other RNA
gtgtgcctaatcgtcaaggaa

SEQ ID NO: 345 - RNA, 21 nt, synthetic construct
  source 1..21: mol_type = other RNA
catggctcagtgaacaaattc

SEQ ID NO: 346 - RNA, 21 nt, synthetic construct
  source 1..21: mol_type = other RNA
gctgtaatcagtgtgagcctc

SEQ ID NO: 347 - RNA, 21 nt, synthetic construct
  source 1..21: mol_type = other RNA
ctggccactgattgggtcaca

SEQ ID NO: 348 - RNA, 21 nt, synthetic construct
  source 1..21: mol_type = other RNA
ttttctctgcaggtgtcacac

SEQ ID NO: 349 - RNA, 21 nt, synthetic construct
  source 1..21: mol_type = other RNA
attgggtcacaaatggtccca

SEQ ID NO: 350 - RNA, 21 nt, synthetic construct
  source 1..21: mol_type = other RNA
ctgattgggtcacaaatggtc

SEQ ID NO: 351 - RNA, 21 nt, synthetic construct
  source 1..21: mol_type = other RNA
ccatttgtgacccaatcagtg

SEQ ID NO: 352 - RNA, 21 nt, synthetic construct
  source 1..21: mol_type = other RNA
ttaggtgtgatcattgcaatt

SEQ ID NO: 353 - RNA, 21 nt, synthetic construct
  source 1..21: mol_type = other RNA
ggatttaaatttctccgaagc

SEQ ID NO: 354 - RNA, 21 nt, synthetic construct
  source 1..21: mol_type = other RNA
aggcctgtgactgtgacacag

SEQ ID NO: 355 - RNA, 21 nt, synthetic construct
  source 1..21: mol_type = other RNA
gcaagcccaatgttgaaggga

SEQ ID NO: 356 - RNA, 21 nt, synthetic construct
  source 1..21: mol_type = other RNA
cacacaggcactggccactga

SEQ ID NO: 357 - RNA, 21 nt, synthetic construct
  source 1..21: mol_type = other RNA
ttagggcttaggtgtgatcat

SEQ ID NO: 358 - RNA, 21 nt, synthetic construct
  source 1..21: mol_type = other RNA
ttcctctgtctgccttgcaac

SEQ ID NO: 359 - RNA, 21 nt, synthetic construct
  source 1..21: mol_type = other RNA
cacaggtacaatttgaccatt

SEQ ID NO: 360 - RNA, 21 nt, synthetic construct
  source 1..21: mol_type = other RNA
agaaggtgtaatcagtgtcaa

SEQ ID NO: 361 - RNA, 21 nt, synthetic construct
  source 1..21: mol_type = other RNA
cttttttgcactcacactgcc

SEQ ID NO: 362 - RNA, 21 nt, synthetic construct
  source 1..21: mol_type = other RNA
gcattacagacagtcccaggg

SEQ ID NO: 363 - RNA, 21 nt, synthetic construct
  source 1..21: mol_type = other RNA
tctcccttcaacattgggctt

SEQ ID NO: 364 - RNA, 21 nt, synthetic construct
  source 1..21: mol_type = other RNA
aggcacacacaggcactggcc

SEQ ID NO: 365 - RNA, 21 nt, synthetic construct
  source 1..21: mol_type = other RNA
agaatttgttcactgagccat

SEQ ID NO: 366 - RNA, 21 nt, synthetic construct
  source 1..21: mol_type = other RNA
cctaatcgtcaaggaagaagg

SEQ ID NO: 367 - RNA, 21 nt, synthetic construct
  source 1..21: mol_type = other RNA
aatcagtgtgagcctcacagg

SEQ ID NO: 368 - RNA, 21 nt, synthetic construct
  source 1..21: mol_type = other RNA
caatgatcacacctaagccct

SEQ ID NO: 369 - RNA, 21 nt, synthetic construct
  source 1..21: mol_type = other RNA
attttatctttagggcttagg

SEQ ID NO: 370 - RNA, 21 nt, synthetic construct
  source 1..21: mol_type = other RNA
taaatggctctctgctgtgta

SEQ ID NO: 371 - RNA, 21 nt, synthetic construct
  source 1..21: mol_type = other RNA
ctggcagtgttgaaaattgtc

SEQ ID NO: 372 - RNA, 21 nt, synthetic construct
  source 1..21: mol_type = other RNA
catctggcagtgttgaaaatt

SEQ ID NO: 373 - RNA, 21 nt, synthetic construct
  source 1..21: mol_type = other RNA
caacactgccagatgtgtgag

SEQ ID NO: 374 - RNA, 21 nt, synthetic construct
  source 1..21: mol_type = other RNA
agcttcggagaaatttaaatc

SEQ ID NO: 375 - RNA, 21 nt, synthetic construct
  source 1..21: mol_type = other RNA
aagaattattttgccgtaggt

SEQ ID NO: 376 - RNA, 21 nt, synthetic construct
  source 1..21: mol_type = other RNA
aatttgcaaggacattgtcct

SEQ ID NO: 377 - RNA, 21 nt, synthetic construct
  source 1..21: mol_type = other RNA
aggaatcacactcacacatct

SEQ ID NO: 378 - RNA, 21 nt, synthetic construct
  source 1..21: mol_type = other RNA
aggacaatgtccttgcaaatt

SEQ ID NO: 379 - RNA, 21 nt, synthetic construct
  source 1..21: mol_type = other RNA
agtggccagtgcctgtgtgtg

SEQ ID NO: 380 - RNA, 21 nt, synthetic construct
  source 1..21: mol_type = other RNA
tttaaatttctccgaagcttt

SEQ ID NO: 381 - RNA, 21 nt, synthetic construct
  source 1..21: mol_type = other RNA
atgttgaagggagacagtgca

SEQ ID NO: 382 - RNA, 21 nt, synthetic construct
  source 1..21: mol_type = other RNA
ttgcaactgtgataagactgg

SEQ ID NO: 383 - RNA, 21 nt, synthetic construct
  source 1..21: mol_type = other RNA
aactgtgataagactgggaca

SEQ ID NO: 384 - RNA, 21 nt, synthetic construct
  source 1..21: mol_type = other RNA
tgctgtgtaacaaatcaacag

SEQ ID NO: 385 - RNA, 21 nt, synthetic construct
  source 1..21: mol_type = other RNA
tcattaaagcttcggagaaat

SEQ ID NO: 386 - RNA, 21 nt, synthetic construct
  source 1..21: mol_type = other RNA
cagcagagagccatttattgt

SEQ ID NO: 387 - RNA, 21 nt, synthetic construct
  source 1..21: mol_type = other RNA
tcagtgtcaaccaggtaagaa

SEQ ID NO: 388 - RNA, 21 nt, synthetic construct
  source 1..21: mol_type = other RNA
cagggagggatccagctgtgt

SEQ ID NO: 389 - RNA, 21 nt, synthetic construct
  source 1..21: mol_type = other RNA
aatcaacaggacaatgtcctt

SEQ ID NO: 390 - RNA, 21 nt, synthetic construct
  source 1..21: mol_type = other RNA
acacctgcagagaaaactttt

SEQ ID NO: 391 - RNA, 21 nt, synthetic construct
  source 1..21: mol_type = other RNA
catttattgtcccagtcttat

SEQ ID NO: 392 - RNA, 21 nt, synthetic construct
  source 1..21: mol_type = other RNA
attttcaacactgccagatgt

SEQ ID NO: 393 - RNA, 21 nt, synthetic construct
  source 1..21: mol_type = other RNA
agttgcaaggcagacagagga

SEQ ID NO: 394 - RNA, 21 nt, synthetic construct
  source 1..21: mol_type = other RNA
agtgttgaaaattgtcaatgg

SEQ ID NO: 395 - RNA, 21 nt, synthetic construct
  source 1..21: mol_type = other RNA
cccaatgttgaagggagacag

SEQ ID NO: 396 - RNA, 21 nt, synthetic construct
  source 1..21: mol_type = other RNA
tttctttcttacctggttgac

SEQ ID NO: 397 - RNA, 21 nt, synthetic construct
  source 1..21: mol_type = other RNA
aatatattttatctttagggc

SEQ ID NO: 398 - RNA, 21 nt, synthetic construct
  source 1..21: mol_type = other RNA
cattgacaattttcaacactg

SEQ ID NO: 399 - RNA, 21 nt, synthetic construct
  source 1..21: mol_type = other RNA
taacccataaaagttttctct

SEQ ID NO: 400 - RNA, 21 nt, synthetic construct
  source 1..21: mol_type = other RNA
tgcagagaaaacttttatggg

SEQ ID NO: 401 - RNA, 21 nt, synthetic construct
  source 1..21: mol_type = other RNA
gtgatcattgcaattttggat

SEQ ID NO: 402 - RNA, 21 nt, synthetic construct
  source 1..21: mol_type = other RNA
gcaaaaaagaagccaaaggac

SEQ ID NO: 403 - RNA, 21 nt, synthetic construct
  source 1..21: mol_type = other RNA
gaaatttaaatccaaaattgc

SEQ ID NO: 404 - RNA, 21 nt, synthetic construct
  source 1..21: mol_type = other RNA
actgattacaccttcttcctt

SEQ ID NO: 405 - RNA, 21 nt, synthetic construct
  source 1..21: mol_type = other RNA
agaggaaagaattattttgcc

SEQ ID NO: 406 - RNA, 21 nt, synthetic construct
  source 1..21: mol_type = other RNA
ggagaaatttaaatccaaaat

SEQ ID NO: 407 - RNA, 23 nt, synthetic construct
  source 1..23: mol_type = other RNA
tctttagggcttaggtgtgatca

SEQ ID NO: 408 - RNA, 23 nt, synthetic construct
  source 1..23: mol_type = other RNA
gggcttaggtgtgatcattgcaa

SEQ ID NO: 409 - RNA, 23 nt, synthetic construct
  source 1..23: mol_type = other RNA
gatttaaatttctccgaagcttt

SEQ ID NO: 410 - RNA, 23 nt, synthetic construct
  source 1..23: mol_type = other RNA
aatttctccgaagctttaatgat

SEQ ID NO: 411 - RNA, 23 nt, synthetic construct
  source 1..23: mol_type = other RNA
aatccaaaattgcaatgatcaca

SEQ ID NO: 412 - RNA, 23 nt, synthetic construct
  source 1..23: mol_type = other RNA
tccgaagctttaatgatgttgga

SEQ ID NO: 413 - RNA, 23 nt, synthetic construct
  source 1..23: mol_type = other RNA
atgatgttggatgtgagccctgc

SEQ ID NO: 414 - RNA, 23 nt, synthetic construct
  source 1..23: mol_type = other RNA
ttcactgagccatggaggttaca

SEQ ID NO: 415 - RNA, 23 nt, synthetic construct
  source 1..23: mol_type = other RNA
cactcacactgcccagagtgagg

SEQ ID NO: 416 - RNA, 23 nt, synthetic construct
  source 1..23: mol_type = other RNA
gcttcttttttgcactcacactg

SEQ ID NO: 417 - RNA, 23 nt, synthetic construct
  source 1..23: mol_type = other RNA
tctgcaggtgtcacactgaagtc

SEQ ID NO: 418 - RNA, 23 nt, synthetic construct
  source 1..23: mol_type = other RNA
tgggttagatgtcaccaattgta

SEQ ID NO: 419 - RNA, 23 nt, synthetic construct
  source 1..23: mol_type = other RNA
ttgcactgtctcccttcaacatt

SEQ ID NO: 420 - RNA, 23 nt, synthetic construct
  source 1..23: mol_type = other RNA
gagggaaacttctacctacggca

SEQ ID NO: 421 - RNA, 23 nt, synthetic construct
  source 1..23: mol_type = other RNA
cctccaaacatttattgcactgt

SEQ ID NO: 422 - RNA, 23 nt, synthetic construct
  source 1..23: mol_type = other RNA
ccgtaggtagaagtttccctcca

SEQ ID NO: 423 - RNA, 23 nt, synthetic construct
  source 1..23: mol_type = other RNA
ctctgtctgccttgcaactgtga

SEQ ID NO: 424 - RNA, 23 nt, synthetic construct
  source 1..23: mol_type = other RNA
ttgtcccagtcttatcacagttg

SEQ ID NO: 425 - RNA, 23 nt, synthetic construct
  source 1..23: mol_type = other RNA
ttacacagcagagagccatttat

SEQ ID NO: 426 - RNA, 23 nt, synthetic construct
  source 1..23: mol_type = other RNA
caaggacattgtcctgttgattt

SEQ ID NO: 427 - RNA, 23 nt, synthetic construct
  source 1..23: mol_type = other RNA
accattgacaattttcaacactg

SEQ ID NO: 428 - RNA, 23 nt, synthetic construct
  source 1..23: mol_type = other RNA
aacactgccagatgtgtgagtgt

SEQ ID NO: 429 - RNA, 23 nt, synthetic construct
  source 1..23: mol_type = other RNA
tgacccaatcagtggccagtgcc

SEQ ID NO: 430 - RNA, 23 nt, synthetic construct
  source 1..23: mol_type = other RNA
ttacctggttgacactgattaca

SEQ ID NO: 431 - RNA, 23 nt, synthetic construct
  source 1..23: mol_type = other RNA
tttcttacctggttgacactgat

SEQ ID NO: 432 - protein, 7 aa, Simian virus 40
PKKKRKV

SEQ ID NO: 433 - protein, 7 aa, Simian virus 40
PKKKRRV

SEQ ID NO: 434 - protein, 16 aa, unidentified
KRPAATKKAGQAKKKK

SEQ ID NO: 435 - DNA, 60 bp, unidentified
  source 1..60: mol_type = unassigned DNA
tagcaataaaggatcgtttattttcattggaagcgtgtgttggttttttgatcaggcgcg

SEQ ID NO: 436 - DNA, 264 bp, synthetic construct
  source 1..264: mol_type = other DNA
aaggtcgggcaggaagagggcctatttcccatgattccttcatatttgcatatacgatacaaggctgttagagagataattagaattaatttgactgtaaacacaaagatattagtacaaaatacgtgacgtagaaagtaataatttcttgggtagtttgcagttttaaaattatgttttaaaatggactatcatatgcttaccgtaacttgaaagtatttcgatttcttggctttatatatcttgtggaaaggacgaaacacc

1. A nucleic acid comprising sequences encoding a Cas9 protein, and a first gRNA, and a second gRNA, wherein the target sequence of the first gRNA is any one of SEQ ID NOs: 2-244 and the target sequence of the second gRNA is any one of SEQ ID NOs: 245-431.

2. The nucleic acid of claim 1, wherein the target sequence of the first gRNA is SEQ ID NO: 17 and the target sequence of the second gRNA is SEQ ID NO: 313.

3. The nucleic acid of claim 1, wherein the target sequence of the first gRNA is SEQ ID NO: 17 and the target sequence of the second gRNA is SEQ ID NO: 260.

4. The nucleic acid of any of claim 1, wherein the nucleic acid encodes S. pyogenes Cas9 or S. aureus Cas9, optionally KKH SaCas9.

5. The nucleic acid of claim 1, wherein the Cas9 comprises a nuclear localization signal, e.g., a C-terminal nuclear localization signal and/or an N-terminal nuclear localization signal; and/or wherein the sequences encoding Cas9 comprises a polyadenylation signal.

6. The nucleic acid of claim 1, wherein the gRNA is a unimolecular S. pyogenes or S. aureus gRNA, or the corresponding two-part modular S. pyogenes or S. aureus gRNA.

7. The nucleic acid of one of claim 1, which comprises a viral delivery vector, preferably an adeno-associated virus (AAV) vector.

8. The nucleic acid of claim 7, wherein the viral delivery vector comprises a promoter for Cas9, preferably a CMV, EFS, U1A, or hGRK1 promoter.

9. The nucleic acid of claim 8, which comprises:
(i) a first guide RNA comprising a targeting domain sequence selected from any one of SEQ ID NOs: 2-244 and a second guide RNA comprising a targeting domain sequence selected from any one of SEQ ID NOs: 245-431;
(ii) a first and a second inverted terminal repeat sequence (ITR); and
(iii) a promoter for driving expression of the Cas9 selected from the group consisting of a CMV, an EFS, an U1A, or an hGRK1 promoter.

10. The nucleic acid of claim 1, for use in therapy.

11. The nucleic acid of claim 1, for use in preparation of a medicament.

12. The nucleic acid of claim 1, for use in a method of treating a subject who has a condition associated with a mutation in exon 13 of USH2A gene.

13. The nucleic acid for the use of claim 12, wherein the condition is Usher syndrome type 2 or autosomal recessive retinitis pigmentosa (arRP).

14. The nucleic acid for the use of claim 12, wherein the AAV vector is delivered to a retina of a subject by injection, such as by subretinal injection, or is delivered to the inner ear of a subject by injection, e.g., through the round window.

15. A composition comprising first ribonucleoprotein (RNP) complexes comprising a Cas9 protein and a first gRNA, and/or second RNP complexes comprising a Cas9 protein and a second gRNA, wherein the target sequence of the first gRNA is any one of SEQ ID NOs: 2-244 and the target sequence of the second gRNA is any one of SEQ ID NOs: 245-431.

16. The composition of claim 15, wherein the target sequence of the first gRNA is SEQ ID NO: 17 and the target sequence of the second gRNA is SEQ ID NO: 313.

17. The composition of claim 15, wherein the target sequence of the first gRNA is SEQ ID NO: 17 and the target sequence of the second gRNA is SEQ ID NO: 260.

18. The composition of claim 15, wherein the Cas9 is S. pyogenes Cas9 or S. aureus Cas9, optionally KKH SaCas9.

19. A method of deleting a sequence comprising an exon 13 splicing acceptor sequence from the USH2A gene in a cell, the deletion comprising part of intron 12 and part of exon 13, ranging from 6 bp to 2 KB, wherein the deletion induces human USH2A exon 13 skipping, the method comprising contacting the cell with the nucleic acid of claim 1.

20. A method of genome editing in human cells, the method comprising using CRISPR editing to form a first double strand break within intron 12 of the human USH2A gene and a second double strand break within exon 13 of the human USH2A gene and results in the removal of a fragment of genome DNA containing part of intron 12 and part of exon 13 of the USH2A gene on chromosome 1.

21. The method of claim 20, wherein the first double strand break is generated using a first gRNA having a target sequence of any one of SEQ ID NOs: 2-244 and the second double strand break is generated using a second gRNA having a target sequence of any one of SEQ ID NOs: 245-431.

22. The method of claim 21, wherein the target sequence of the first gRNA is SEQ ID NO: 17 and the target sequence of the second gRNA is SEQ ID NO: 313.

23. The method of claim 21, wherein the target sequence of the fir
st gRNA is SEQ ID NO: 17 and the target sequence of the second gRNA is SEQ ID NO: 260.

24. The method of claim 20, wherein the cell is in or from a subject who has a mutation in the USH2A gene.

25. The method of claim 20, wherein the cell is a cell of the eye or inner ear of a mammal.
